(19) United States
(12) Patent Application Publication
(10) Pub. No.: US 2013/0183242 A1
(43) Pub. Date: Jul. 18, 2013

(54) METHODS FOR IDENTIFYING TUMOR-SPECIFIC POLYPEPTIDES

(71) Applicant: UNIVERSITY OF CONNECTICUT, Farmington, CT (US)

(72) Inventor: David Han, Farmington, CT (US)

(73) Assignee: UNIVERSITY OF CONNECTICUT, Farmington, CT (US)

(21) Appl. No.: 13/744,953

(22) Filed: Jan. 18, 2013

Related U.S. Application Data
(60) Provisional application No. 61/588,105, filed on Jan. 18, 2012.

(51) Int. Cl. G01N 27/62

(52) U.S. Cl. CPC G01N 27/62
USPC 424/9.1; 435/23; 435/6.11; 506/18; 530/326; 530/387.9; 530/327; 530/324; 424/185.1; 530/391.7; 424/178.1; 530/391.3; 424/93.71

(57) ABSTRACT

The present invention provides methods for identifying tumor-specific polypeptides, polypeptides so identified, and methods for their use.

### CROSS-REFERENCE

[0001] This application claims priority to U.S. Provisional Patent Application Ser. No. 61/588,105 filed Jan. 18, 2012, incorporated by reference herewith in its entirety.

### BACKGROUND

[0002] The last two decades of research and clinical practice have convincingly demonstrated that the immune system plays a critical, surveillance role in detecting tumor-specific antigens and in eliminating cancer cells. Although this research clearly indicates the importance of the immune system in preventing and/or eradicating cancer, the molecular basis for cancer immunity is not comprehensively understood. Furthermore, even with the exponential growth of adaptive immunity strategies seen in recent years, clinical trials of cancer immunotherapy continue to show disappointingly low rates of objective response, particularly for invasive, vascularized cancer. Most cancer treatments still rely on broad-spectrum genotoxic chemotherapeutic agents with severe side effects. Patient- and cancer-specific targeted therapies are mostly in the early phases and very few any showed wide-spread clinical success with complete eradication of disease. One critical unresolved issue relating to cancer immunogenicity is determining the total number and molecular identities of high-affinity antigens specific to cancer. A more extensive knowledge of tumor-specific antigens and the signaling pathways they impact may facilitate a deeper understanding of the molecular basis of antitumor immunity, why the immune system fails in cancer patients, and how it can be re-empowered to eliminate cancer cells with exquisite sensitivity and specificity.

[0003] Thus, new and effective strategies to detect and manage cancer effectively and comprehensively are critically needed.

### SUMMARY OF THE INVENTION

[0004] To a first aspect, the present invention provides methods for identifying tumor-specific polypeptides, comprising:

[0005] obtaining a tumor polypeptide set from a tumor sample;

identifying polypeptides present in the tumor sample by comparing the tumor polypeptide set with a reference polypeptide set;

[0006] obtaining known mutant polypeptides for each identified tumor polypeptide from a mutant polypeptide set; and

[0007] identifying tumor-specific polypeptides by combining the tumor polypeptide set and the known mutant polypeptides and removing wild-type polypeptides.

[0008] In one embodiment, the methods may further comprise obtaining mass spectra for one or more of the polypeptides, and identifying the one or more polypeptides by the mass spectra. In another embodiment, the methods may farther comprise obtaining a sample mass spectra library of polypeptides from a tumor sample; and generating the tumor polypeptide set by converting the mass spectra library to a set of tumor polypeptide sequences. In a still further embodiment, the methods may further comprise obtaining a gene mutation set from the tumor sample; and generating the tumor polypeptide set by translating the DNA in the gene mutation set to amino acid sequences. In another embodiment, the methods may further comprise identifying tumor-specific polypeptides by identifying the polypeptides that are present in both the tumor polypeptide set and the known mutant polypeptides.

[0009] In various further embodiments, the methods may further comprise obtaining a tumor-specific mass spectra library from the tumor-specific polypeptides; comparing the sample mass spectra library and the tumor-specific mass spectra library; and identifying additional tumor-specific polypeptides by identifying polypeptides present in the sample mass spectra library and the tumor-specific mass spectra library. In this embodiment, the methods may further comprise obtaining the DNA sequences of the tumor-specific polypeptides from a reference database; identifying DNA sequences present in both the gene mutation set and the DNA sequences of the tumor-specific polypeptides; and identifying additional tumor-specific polypeptides by translating the shared sequences to amino acid sequences. In a further embodiment, the methods may comprise identifying tumor-specific polypeptides by identifying polypeptides that are present only in the tumor polypeptide set.

[0010] In a second aspect, the present invention provides methods for generating a tumor polypeptide signature in a patient, comprising identifying polypeptides specific for a patient's tumor sample according to any embodiment or combination of embodiments of the first aspect of the invention.

[0011] In a third aspect, the present invention provides methods for selecting a treatment strategy in a patient, comprising:

[0012] generating a tumor polypeptide signature according to the second aspect of the invention;

[0013] obtaining the tumor polypeptide signature from one or more other patients who have been favorably treated;

[0014] comparing the patient's tumor polypeptide signature with the other patient's tumor polypeptide signatures;

[0015] determining the similarity of the signatures; and

[0016] selecting a treatment strategy that produced a favorable outcome in the other patient if the signatures are similar.

[0017] In one embodiment, the methods may further comprise determining the binding affinities for known tumor antigens of the polypeptides in the patient's signature; determining the binding affinities for known tumor antigens of the polypeptides in the signature of one or more other patients; compiling the polypeptides that display high binding affinities for tumor antigens with the polypeptides that display high binding affinities in the other patient; determining the similarity of the polypeptides with high binding affinities; selecting a treatment strategy that produced a favorable outcome in the other patient if the polypeptides with high binding affinities are similar. In a further embodiment, the known tumor antigen is an HLA receptor.

[0018] In a fourth aspect, the present invention provides isolated polypeptides comprising or consisting of one or more of the amino acid sequences according to any one of SEQ ID NO:1-23; these polypeptides can be used, for example, as vaccines or in methods to generate antibodies and induce an immune response. In a fifth aspect, the present invention provides isolated nucleic acids comprising or consisting of a sequence that encodes a polypeptide according to any one of SEQ ID NO:1-23. In a sixth aspect, the present invention provides compositions comprising or consisting of two or more of the polypeptides of the fourth aspect of the invention (Which can be linked, such as when used as a vaccine), or two or more of the nucleic acids according to the fifth aspect of the invention. In a seventh aspect, the present invention provides binding molecules, including but not limited to antibodies, that selectively bind to at least one of the polypeptides identified as SEQ. ID. Nos. 1-23, and pharmaceutical compositions thereof. In one embodiment, the binding molecule can be combined with/conjugated to a therapeutic agent for use, for example, in targeting therapeutic agents to a tumor. In one embodiment, the binding molecule can be combined with/conjugated to a detectable label for use, for example, in detectably labeling a tumor or diagnosing cancer in a subject. In one embodiment, the binding molecule such as an antibody against a mutated protein present in the blood or other body fluid (including but not limited to serum, urine, saliva, sweat, breast milk, feces, etc) of cancer patients can be detected by using so called “peptide microarrays”, in which mutant peptides are immobilized on a solid, support or in which mutant peptides labeled with fluorescence or radioactive tracers are used to detect the presence of mutant peptide binding antibodies for diagnosis of cancer.

[0019] In an eighth aspect, the present invention provides methods for increasing a patient's immune response to tumor cells, comprising administering one or more of the polypeptides identified as SEQ. ID. NO. 1-23 to a patient. In one embodiment, the polypeptides can be administered prior to traditional cancer immunotherapy to enhance efficacy of the immunotherapy. In one embodiment, selection of mutant peptides for anti-cancer vaccines and immunotherapy can be accomplished by using mutant peptide microarrays, in which known available mutations identified from cancer genome sequencing projects can be used to select for specific mutant peptides that invoke strong antibody response in a cancer patient.

[0020] In a ninth aspect, the present invention provides arrays comprising a polypeptide set, the set consisting of one or more tumor-specific polypeptides identified by the method according to any embodiment or combination of embodiments of the first aspect of the invention.

[0021] In a tenth aspect, the present invention provides methods of generating antigen-HLA receptor complexes, comprising:

[0022] identifying tumor-specific polypeptides according any embodiment or combination of embodiments of the first aspect of the invention;

[0023] selecting tumor-specific polypeptides that bind to one or more HLA receptors;

[0024] obtaining recombinant tumor-specific polypeptides; and

[0025] conjugating the recombinant tumor-specific polypeptides with one or more HLA receptors.

[0026] In one embodiment, the method may further comprise labeling the recombinant tumor specific polypeptides with a detectable label.

[0027] In an eleventh aspect, the present invention provides methods for treating cancer comprising

[0028] obtaining a sample from a cancer patient;

[0029] sorting cells in the patient sample with one or more of the antigen-HLA receptor complexes of any embodiment or combination of embodiments of the tenth aspect of the invention;

[0030] identifying cancer-specific T-cells in the sample;

[0031] growing the cancer-specific T-cells in cell culture; and

[0032] administering the cancer-specific T cells to the cancer patient.

[0033] In a twelfth aspect, the present invention provides methods for generating a DNA vaccine comprising:

[0034] identifying tumor-specific polypeptides according to any embodiment or combination of embodiments of the first aspect of the invention;

[0035] identifying the antigenic regions of the tumor-specific polypeptides;

[0036] obtaining nucleotide sequences that encode for a peptide that targets the antigenic regions of the tumor-specific polypeptides; and

[0037] preparing the DNA sequences as a vector.

[0038] In a thirteenth aspect, the present invention provides DNA vaccines comprising a nucleotide sequence encoding a peptide that targets the antigenic regions of a tumor-specific polypeptide or any embodiment or combination of embodiments of the invention.

### DESCRIPTION OF THE FIGURES

[0039] FIG. 1. (A) An approach to enrich tumor epithelial cells from the breast cancers is shown. H&E pictures of pre- and postcore images of a breast tumor is shown. (B) A Coomassie stained gel containing protein extracts; from twelve breast cancer samples is shown. The lines demarcate 15 gel slices excised for protein identification.

[0040] FIG. 2. Steps involved in the process of mutant peptide identification are outlined. Major steps include creation of cancer-specific database from the compiled, list of high-confidence proteins; addition of missense mutations; addition of frame-shift mutations from exonic regions; SEQUEST search of mutant database; detection of mutant peptides.

[0041] FIG. 3. Predicting mutant gene saturation in pancreatic, colorectal, breast, and glioblastoma cancers. A running total of identified mutant genes (x-axis) is plotted against the corresponding number of unique mutant genes (y-axis) as each patient is added. (A) Two assumptions are explored in approximating the graph of unique mutant genes versus total mutant genes. The circles represent the 24 samples included in the analysis. (B) The estimated number of samples necessary to reach saturation was then determined by dividing total mutant genes by the average number of mutant genes per sample.

[0042] FIG. 4. Exemplary depiction of a spectra identifier 108 configured to communicate, via network 106, with mass spectrometer 102 and client devices 104a, 104b.

[0043] FIG. 5. Exemplary flowchart of user interface module 201 configured to send and/or receive data to and/or from user input devices such as a keyboard, a keypad, a touch screen, a computer mouse, a track ball, a joystick, a camera, a voice recognition module, and/or other similar devices.

### DETAILED DESCRIPTION OF THE INVENTION

[0044] All embodiments disclosed herein can be combined unless the context clearly dictates otherwise. Unless defined otherwise, all terms are defined as understood one of ordinary skill in the art.

[0045] As used herein, “obtaining” can be any method of acquiring a data set indicated. For example, a tumor polypeptide set can be obtained in several ways as is known in the art. “Obtaining” a data set of polypeptides includes but is not limited to polypeptide extraction, mass spectrometry identification of a sample and conversion to polypeptide sequences, and retrieving the polypeptides from a previously-derived, reference database.

[0046] As used herein, “reference database” or “reference polypeptide set” is defined as any database that contains information on DNA sequences, amino acid sequences, or both DNA and amino acid sequences. In a preferred embodiment, the reference database or reference polypeptide set also has information on mutations in DNA or amino acid sequences. In other embodiments, the reference database or reference polypeptide set contains mass spectra information on amino acid sequences in the database. Non-limiting examples of a reference database include PubMed GenBank, Uniprot FASTA Release 15.9 and UniprotKB XML Release 15.9. In certain embodiments, the DNA or protein databases are stored on a computing device as described herein.

[0047] The “gene mutation set”, as used herein is defined as a set of genes from a tumor sample which contain mutations. In some embodiments, this set is generated by comparing the polypeptide sequence from a sample with a wild-type sequence. This set can be generated from any source, including but not limited, to a reference database, gene array, or from direct sequencing. In certain embodiments, the whole genome of the sample is sequenced, and the full genome is translated to amino acid sequence.

[0048] As used herein, “similar” or “similarity” is defined as a patient signature sharing expression of one or more polypeptides with another patient signature. In some embodiments, a patient signature is considered similar to another if one or more tumor-specific polypeptides or genes are shared between the signatures. In other embodiments, 10 or more polypeptides or genes are shared. In other embodiments, 2, 4, 5, 10, 23, 20, 50, 100, 200, 500, 1000, 5000, or 10000 polypeptides or genes are shared.

[0049] As used herein, “tumor cell antigen” is defined as any antigen expressed by a tumor cell. In a preferred embodiment, the tumor cell antigen is expressed on the outside of the cell or is secreted.

[0050] As used herein, “binding affinity” is defined as the ability of one molecule to bind to another molecule. When defining binding affinities as “high”, “low”, or any other qualitative definition, any set of accepted differential binding properties can be used. For example, the IEDB web site (www.iedb.org) defines <50 mM as high, 50-500 as intermediate, and >500 as low affinity.

[0051] “Selectively binds” as used herein refers to a binding reaction that is determinative of the presence of the protein in a heterogeneous population of proteins and other biologics.

[0052] “Targeting” as used herein directing the entity to which it is attached (e.g., therapeutic agent or marker) to a target cell, for example to a specific type of tumor cell. Alternatively, “targeting” can also mean preferentially activated at a target tissue, for example a tumor.

[0053] “Conjugated” as used herein, means joined. The binding molecule can be conjugated to the agent using any known method, including both covalently or noncovalently joining one molecule to another.

[0054] The word “label” when used herein refers to a detectable compound or composition which is conjugated directly or indirectly to the binding molecule. The label may be detectable by itself (e.g. radioisotope labels or fluorescent labels) or, in the case of an enzymatic label, may catalyze chemical alteration of a substrate compound or composition which is detectable. Many detectable labels are well known in the art.

[0055] The invention discloses an integrated genomics and proteomics approach termed oncoproteomics in which targeted proteomic screens for detection of genome-wide mutations from cancer are implemented. The invention further identifies cancer-specific genomic mutations at the protein level to determine whether mutations identified in exonic DNA can be detected through proteomic analysis.

[0056] To search for cancer-specific mutant proteins, the inventors have utilized proteomic datasets from cancer cells and tissues generated from the laboratory. Any type of human tissue can be used as a sample. In a preferred embodiment, the sample is a tumor sample. In one embodiment, tumor polypeptides are extracted from a tissue sample, as is known in the art, and disclosed in the Examples.

[0057] In one aspect the invention discloses a method for identifying tumor-specific polypeptides, comprising obtaining a tumor polypeptide set from a tumor sample, identifying polypeptides present in the tumor sample by comparing the tumor polypeptide set with a reference polypeptide set, obtaining known mutant polypeptides for each identified tumor polypeptide from a mutant polypeptide set, and identifying tumor-specific polypeptides by combining the tumor polypeptide set and the known mutant polypeptides and removing wild-type polypeptides. Identifying tumor-specific polypeptides according to the method can be applied to all types of cancer. In certain embodiments, the tumor sample is derived from human tissues. Non-limiting examples include breast cancers, pancreatic cancers, liver cancer, skin cancers, leukemia and melanoma. In other embodiments, the sample is from a cancer cell line.

[0058] All types of mutant polypeptides are obtained, including missense mutations, frameshift deletions, duplications, and insertions and any other known mutation. In certain embodiments, the retrieval of mutations are carried out automatically via computer program, such as Java code. At times, additional mutations mast be added manually when they are not contained in the reference database of choice. In other embodiments, the genomic variant that matched the reported mutation in the correct position and for the correct number of nucleotides was found, appropriately modified, and translated into its mutant protein counterpart. This mutation can then be added to the other mutant polypeptides. Creation of mutant databases is summarized in the first three steps of FIG. 2.

[0059] Once the mutant databases are created, experimentally-generated peptide MS/MS spectra can be re-searched against their respective mutant database to identify other possible cancer-specific mutant peptides (see FIG. 2). In one embodiment, the method further comprises obtaining mass spectra from one or more of the polypeptides, and identifying the one or more polypeptide by the mass spectra. The mass spectra of the invention can be obtained in any way, including generating the mass spectra from an extracted polypeptide sample, and theoretically using an algorithm. One example of such an algorithm is the SEQUEST algorithm, which allows protein identification from un-interpreted MS/MS spectra. In a preferred embodiment, the tumor cell samples are analyzed using the 1D-GeLC-MS/MS-based protein identification strategy. From one cancer sample, approximately 300,000 MS/MS spectra (sequencing attempts) were generated typically. Each of the spectra has a potential to be identified as a unique peptide.

[0060] In another embodiment the method further comprises obtaining a sample mass spectra library of polypeptides from a tumor sample and generating the tumor polypeptide set by converting the mass spectra library to polypeptide sequences. In this way, the amino acid sequence of the polypeptide can be identified from the mass spectra. In this embodiment, the mass spectra is generated directly from the tumor sample. The generated mass spectra can then be converted to polypeptide sequence. This facilitates identification of the full-length protein affiliated with the extracted polypeptide.

[0061] In another embodiment the method further comprises obtaining a tumor-specific mass spectra library from the tumor-specific polypeptides, and comparing the sample mass spectra library and the tumor-specific mass spectra library, and identifying additional tumor-specific polypeptides by identifying polypeptides present in the sample mass spectra library and the tumor-specific mass spectra library. Mass spectra will not always be readily generated from a protein extract from a tumor sample, because some of the polypeptides are in low quantity or produce poor signal. In this embodiment, a cumulative mutant dataset is generated. This new cumulative mutant dataset can be used to re-analyze the tumor mass spectra and identify the polypeptides that could not be identified in the first pass analysis. In other embodiments, the method further comprises comprising identifying tumor-specific polypeptides by identifying polypeptides that are present only in the tumor polypeptide set. The mass spectra generated from the tumor sample extraction analysis can be stored and used for future studies.

[0062] Tumor-specific polypeptides can also be generated using a genomic approach. DNA sequencing has become more common and is readily available to patients far sequencing of individual patient genomes. The DNA sequence of a patient is becoming a more useful tool for diagnostics. In one embodiment, the method for identifying tumor-specific polypeptides further comprises obtaining a gene mutation set from the tumor sample and generating the tumor polypeptide set by translating the DNA in the gene mutation set to amino acid sequences. In certain embodiments, the DNA sequence can be compared to a reference DNA sequence, and differences identified as the source of potential tumor-specific polypeptides. In certain embodiments, genomic data can be translated theoretically and compared to known amino acid mutations. The amino acid sequences of the sample can be compared to a wild type reference database to determine which polypeptides are mutated when compared to the wild type amino acid sequences.

[0063] In another embodiment, the method further comprises identifying tumor-specific polypeptides by identifying the polypeptides that are present in both the tumor polypeptide set and the blown mutant polypeptides. In this embodiment, the method seeks to capture the polypeptides that are specific to the particular tumor sample. In certain embodiments, the specific polypeptides are also specific to the patient.

[0064] In another embodiment, the method further comprises obtaining the DNA sequences of the tumor-specific polypeptides from a reference database, identifying DNA sequences present in both the gene mutation set and the DNA sequences of the tumor-specific polypeptides, and identifying additional tumor-specific polypeptides by translating the shared sequences to amino acids sequences. In this embodiment, the DNA sequences of the tumor-specific polypeptides are obtained using a reference database. These DNA sequences can be compared to the sequences in the gene mutation set, which will generate additional tumor-specific polypeptides which may be useful in any of the applications described in the invention.

[0065] The invention discloses a large-scale shotgun proteomic analysis which can efficiently identify patient-specific mutant proteins directly from human tumor tissue samples.

[0066] In another aspect, the invention discloses a method for generating a tumor polypeptide signature in a patient, comprising identifying polypeptides specific for a patient's tumor sample according to the described methods. This tumor polypeptide signature in a patient will contain a set of all of the tumor-specific polypeptides that have been identified for that particular patient's tumor sample. This signature can have many uses, including but not limited to cancer diagnosis, prognosis, predictions on response to therapy, and cancer treatment choices. Correlations between patients and their expression of certain tumor-specific polypeptides provides essential data which will allow predictions on other patients who share this polypeptide expression signature.

[0067] The tumor polypeptide signature of a patient can be compared to the signature of other patients, and cancer treatment can be optimized based on these comparisons. In another aspect, the invention discloses a method for selecting a treatment strategy in a patient, comprising generating a tumor polypeptide signature according to the methods of the invention, obtaining the tumor polypeptide signature from one or more other patients, comparing the patient's tumor polypeptide signature with the other patient's tumor polypeptide signatures, determining the similarity of the signatures, selecting a treatment strategy that produced a favorable outcome in the other patient if the signatures are similar.

[0068] In one embodiment, the method for selecting a treatment strategy in a patient farther comprises determining, the binding affinities for blown tumor antigens of the polypeptides in the patient's signature, determining the binding affinities for known tumor antigens of the polypeptides in the signature of one or more other patients, comparing the polypeptides that display high binding affinities for tumor antigens with the polypeptides that display high binding affinities in the other patient, determining the similarity of the polypeptides with high binding affinities, and selecting a treatment strategy that produced a favorable outcome in the other patient if the polypeptides with high binding affinities are similar. In certain embodiments, the known tumor antigen is an HLA receptor.

[0069] Tumor-specific polypeptides are identified according to the method of the invention. In another aspect, the invention discloses a polypeptide comprising or consisting of one or more of the amino acid sequences according to SEQ. ID. Nos. 1-23. The amino acid sequences of one exemplary set of tumor-specific polypeptides are shown in Table 1. In other embodiments, the polypeptide comprises or consists of a mutated amino acid sequence of the following proteins: Fragile X mental retardation syndrome-related protein 1; Spectrin alpha chain, brain; NADH dehydrogenase [ubiquinone] 1 alpha subcomplex subunit 2; Fibronectin; Cyclin-dependent kinase inhibitor 2A, isoforms 1/2/3; GTP-binding protein Rheb; Fatty acid-binding protein; adipocyte; Drebrin; Histone H4; Double-stranded RNA-specific adenosine deaminase; Myosin-Ib; 3-oxoacyl-[acyl-carrier-protein] synthase, mitochondrial; Titin; CAP-Gly domain-containing linker protein; Mitotic checkpoint serine/threonine-protein kinase BUB1 beta; Rho guanine nucleotide exchange factor 1; Serine-protein kinase ATM; Myeloperoxidase; Xanthine dehydrogenase/oxidase; DNA-dependent protein kinase catalytic subunit; and/or Eukaryotic initiation factor 4A-II. Any mutant in the wild-type sequences of these proteins (SEQ. ID. Nos. 24-46; Table 2) can be identified by the methods of the invention. In one embodiment, the polypeptide comprises or consists of one or more of the amino acid sequences according to SEQ. ID. Nos. 2, 5, 9, 11, or 20. In another aspect, the invention discloses a composition, comprising or consisting of two or more polypeptides selected from SEQ. ID. Nos. 1-23. In certain embodiments, the two or more polypeptides are linked. The polypeptides can be linked by any number of ways as is known in the art including but not limited to via a covalent bond, via electrostatic interactions via hydrophobic interactions, or a combination thereof. In another embodiment, the polypeptides are linked via a carrier macromolecule or via a cross-linking agent.

[0070] In another embodiment the polypeptide comprises or consists of a breast cancer tumor-specific polypeptide. In certain embodiments, the polypeptide comprises or consists of SEQ. ID. Nos. 4, 6-7, 10, 12-14, 16-17, 20, or 23.

[0071] In another embodiment, the polypeptide comprises or consists of a skin cancer tumor-specific polypeptide. In certain embodiments, the polypeptide comprises or consists of SEQ. ID. Nos. 5, 18, or 21.

[0072] In another embodiment the polypeptide comprises or consists of a liver cancer tumor-specific polypeptide. In certain embodiments, the polypeptide comprises or consists of SEQ. Nos. 3, 9, 11, 15, or 19.

[0073] In another embodiment, the polypeptide comprises or consists of a leukemia tumor-specific polypeptide. In certain embodiments, the polypeptide comprises or consists of SEQ. ID. Nos. 1-2, 8, or 22.

[0074] In another embodiment, the polypeptide comprises or consists of one or more of the tumor-specific polypeptides that bind tumor specific antigens with higher affinity than the wild-type counterpart polypeptides. In one embodiment, the tumor specific antigen is HLA. In another embodiment, the polypeptide is a mutant of IF4A2. In another embodiment the polypeptide comprises or consists of any of the sequences listed on Table 3.

[0075] In another aspect, the invention discloses an isolated nucleic acid comprising or consisting of a sequence that encodes one or more of the polypeptides identified as SEQ. ID. Nos. 1-23.

[0076] Molecules that bind to the tumor-specific polypeptides identified by the invention are useful in several applications, including but not limited to imaging, diagnostics, and targeted treatment. Any use of molecules that bind to the tumor-specific polypeptides identified by the invention is contemplated.

[0077] In another aspect, the invention discloses a binding molecule which selectively binds to at least one of the polypeptides identified as SEQ. ID. Nos. 1-23. In certain embodiments, this means that the molecule binds only one tumor-specific polypeptide and shows little or no binding to other polypeptides. In a particular embodiment, the molecule binds only the tumor-specific polypeptide and shows little or no binding to the corresponding wild-type version of the tumor-specific polypeptide.

[0078] Tumor-specific polypeptides will be selected for generating monoclonal antibodies for early detection, risk stratification, and for testing therapeutic modalities. In one embodiment, the binding molecule comprises an antibody. In a certain embodiment, the antibody is an isolated monoclonal antibody. In another embodiment, the antibody binds at least one of the polypeptides identified as SEQ. ID. No 2, 5, 9, 11, or 20. In another embodiment, the isolated antibody is fully human. In a further embodiment, the invention describes a pharmaceutical composition comprising a pharmaceutically acceptable carrier and a therapeutically effective amount of the antibody. In another embodiment, the array comprises or consists of a breast cancer tumor-specific polypeptide. In certain embodiments, the polypeptide comprises or consists of SEQ. ID. Nos. 4, 6-7, 10, 12-14, 16-17, 20, or 23. In another embodiment, the array comprises or consists of a skin cancer tumor-specific polypeptide. In certain embodiments, the polypeptide comprises or consists of SEQ. ID. Nos. 5, 18, or 21. In another embodiment, the array comprises or consists of a liver cancer tumor-specific polypeptide. In certain embodiments, the polypeptide comprises or consists of SEQ. ID. Nos. 3, 9, 11, 15, or 19. In another embodiment, the array comprises or consists of a leukemia tumor-specific polypeptide. In certain embodiments, the polypeptide comprises or consists of SEQ. ID. Nos. 1-2, 8, or 22.

[0079] In another aspect, the invention describes a method for creating an antibody, the method comprising administering one or more polypeptides identified as SEQ. ID. No. 1-23 to an animal to induce an immune response. Monoclonal antibodies may be made using the hybridoma method first described by Kohler et al. Nature, 256:495 (1975), or may be made by recombinant DNA methods (U.S. Pat. No. 4,816,567). The antibodies of the present invention can be made by any known method. Methods for creating an antibody are well known in the art.

[0080] In another aspect, the invention describes a vaccine comprising one or more polypeptides identified as SEQ. ID. No. 1-23. In one embodiment, the vaccine selectively binds to a tumor antigen with high affinity. In one embodiment, the vaccine comprises one or more polypeptides identified as SEQ. ID. NO 2, 5, 9, 11, or 20. In one embodiment the one or more polypeptides of the vaccine are linked. Any arrangement of polypeptides can be used according to the invention. A number of studies have shown that long peptides can elicit a more potent immune response than a single epitope, even a highly immunogenic epitope. The invention describes a vaccine using a long peptide derived from the linkage of multiple tumor-specific polypeptides exhibiting high-affinity to a range of tumor antigens. In one embodiment, the tumor antigen is HLA receptor.

[0081] In another aspect, the invention describes a method for generating a DNA vaccine. Methods for generating DNA vaccines are well known in the art. In one embodiment, the method comprises identifying tumor-specific polypeptides according to the methods of the invention, identifying the antigenic regions of the tumor-specific polypeptides, obtaining nucleotide sequences that encode for a peptide that targets the antigenic regions of the tumor-specific polypeptides, and inserting the DNA sequences into a vector.

[0082] In another embodiment, the invention describes a DNA vaccine. In certain embodiments, the DNA vaccine comprises a nucleotide sequence encoding a peptide that targets the antigenic regions of a tumor-specific polypeptide. In certain embodiments, the tumor-specific polypeptide is identified using the methods of the invention. These DNA vaccines can be administered to patients as a treatment for cancer. In another embodiment, the tumor-specific polypeptide binds HLA. In yet another embodiment, the tumor-specific polypeptide binds HLA with high affinity.

[0083] In another aspect, the invention describes a method for increasing a patient's immune response to tumor cells, the method comprising administering the polypeptides identified as SEQ. ID. No. 1-23, or other patient-specific mutated polypeptides as determined by genomic or proteomic sequencing of a patient's tumor and normal cells or tissue. In one embodiment the method comprises administering any of the tumor-specific polypeptides identified using the described methods to a patient. In one embodiment, patient-specific mutant polypeptides are used to generate a peptide microarray to test cancer patient's sera or other fluid, to identify which mutant peptides invoke strong immune response. In one embodiment, the presence of antibodies against mutant peptides in patient's blood can be identified by the peptide microarrays and peptides that show strong immune response can be used as anti-cancer vaccine reagents. In one embodiment, the polypeptides of the method are administered prior to traditional cancer immunotherapy to enhance efficacy. In one embodiment, the method describes a combined therapy, which administers tumor-specific polypeptides first to boost cancer immunity, followed by treatment using mutant-epitope specific monoclonal antibodies to kill patient specific cancer cells.

[0084] In another aspect, the invention describes a composition for targeting therapeutic agents to a tumor, comprising the described tumor-specific polypeptide binding molecule, a therapeutic agent, and wherein the binding molecule is conjugated to the therapeutic agent. This targeting composition has a multitude of uses according to the invention. In certain embodiments, tumor-specific polypeptides are selected that are secreted in the serum. In other embodiments, tumor-specific polypeptides are selected that are expressed on the surface of tumor cells.

[0085] In another aspect, the invention describes a method for targeting therapeutic agents to a tumor, comprising administering the targeting composition to a patient with a tumor. In one embodiment, the therapeutic agent is administered in a pharmaceutically acceptable amount to kill cancer cells. Any therapeutic agent can be used. In some embodiments, the therapeutic agent is a cytotoxic agent such as a chemotherapeutic agent, a growth inhibitory agent, a toxin (e.g., an enzymatically active toxin of bacterial fungal, plant or animal origin, or figments thereof), or a radioactive isotope (i.e., a radioconjugate). In one embodiment, the method describes a combined therapy, which administers tumor-specific polypeptides first to boost cancer immunity, followed by treatment using mutant-epitope specific monoclonal antibodies to kill patient specific cancer cells.

[0086] In another aspect, the invention describes a composition for detecting tumors, which comprises the described tumor-specific polypeptide binding molecule, a detectable label; and wherein the binding molecule is conjugated to the detectable label. This detecting composition has a multitude of uses according to the invention. Detectable labels are well blown in the art, as are methods of attaching the to binding molecules. The label may be detectable by itself (e.g. radioisotope labels or fluorescent labels) or, in the case of an enzymatic label, may catalyze chemical alteration of a substrate compound or composition which is detectable. Many detectable labels are well known in the art.

[0087] In another aspect, the invention describes a method of targeting a detectable label to a tumor, comprising administering the detecting composition to a patient. Label detection methods are well known in the art. In certain embodiments, the label is detected using immunohistochemistry or immunofluorescence.

[0088] In another embodiment the invention describes a method for cancer detection, comprising targeting a detectable label to a tumor, and assaying the quantity of detectable label. In another embodiment, the method further comprises determining whether the quantity of label detected is an indicator of cancer.

[0089] In another aspect, the invention describes an array comprising a polypeptide set, the set consisting of one or more tumor-specific polypeptides identified by the methods of the invention. In certain embodiments, the array consists of 2-10,000 polypeptides. In other embodiments, the array consists of 2, 4, 6, 10, 23, 20, 50, 100, 200, 500, 1000, 5000, or 10000 polypeptides. In another embodiment, the array comprises or consists of a breast cancer tumor-specific polypeptide. In certain embodiments, the polypeptide comprises or consists of SEQ. ID. Nos. 4, 6-7, 10, 12-14, 16-17, 20, or 23. In another embodiment, the array comprises or consists of a skin cancer tumor-specific polypeptide. In certain embodiments, the polypeptide comprises or consists of SEQ. ID. Nos. 5, 18, or 21. In another embodiment, the array comprises or consists of a liver cancer tumor-specific polypeptide. In certain embodiments, the polypeptide comprises or consists of SEQ. ID. Nos. 3, 9, 11, 15, or 19. In another embodiment, the array comprises or consists of a leukemia tumor-specific polypeptide. In certain embodiments, the polypeptide comprises or consists of SEQ. ID. Nos. 1-2, 8, or 22.

[0090] In another embodiment, the invention describes a method of generating antigen-HLA receptor complexes. In one embodiment, the antigen-HLA receptor complex are generated by identifying tumor-specific polypeptides according to the listed methods, selecting tumor-specific polypeptides that bind to one or more HLA receptors, obtaining recombinant tumor-specific polypeptides, and linking the recombinant tumor-specific polypeptides with one or more HLA receptors. These antigen-HLA receptor complexes can be used to identify and sort cancer-specific T cells in a patient. The cancer-specific T-cells can be administered to a cancer patient to enhance T-cell mediated killing of cancer cells. Sorting of cancer-specific T cells, growing these cells in cell culture, and infusion or administration of a sufficient number of these T cells to the patient are well known in the art.

[0091] In one specific embodiment, the tumor-specific polypeptides that bind to one or more HLA receptors are selected using T2 stabilization assays. T2 stabilization assays are well known in the art. Briefly, the T2 stabilization assay is based upon the ability of peptides to stabilize the MHC class I complex on the surface of the T2 cell line. The T2 cells are incubated with a specific peptide, the stabilized MHC class I complex is detected using a pan-HLA class I antibody, and analyzed typically using flow cytometry. Binding is assessed in relation to a non-binding negative control peptide.

[0092] Recombinant tumor-specific polypeptides can be obtained by any methods as is well known in the art, including expression from a nucleotide sequence associated with the polypeptide. The recombinant tumor-specific polypeptides can also be obtained, for example, by producing the polypeptide synthetically. In certain embodiments, the recombinant tumor-specific polypeptides are labeled with a detectable label. In other embodiments, the antigen-HLA receptor complex is in multimeric form, including but not limited to a tetramer.

### Example Computing Device and Environment

[0093] The steps of the methods as disclosed can in some aspects be performed using a computing device. For example, results of a comparison between one or more input spectra generated by a mass spectrometer or similar device (e.g., PIMS spectra) and one or more stored spectra (e.g., spectra stored as in a database) can be carried out in an automated fashion using a computing device acting as a “spectra identifier.”

[0094] Upon completion, content related the results of the comparison can be generated by the spectra identifier. For example, the content can include graphs, images, alphanumeric, and/or video content preferably displayed to a user via a graphical user interface on either the spectra identifier or a client device.

[0095] As an example embodiment, FIG. 4 shows spectra identifier 108 configured to communicate, via network 106, with mass spectrometer 102 and client devices 104a, 104b. Network 106 may correspond to a LAN, a wide area network (WAN), a corporate, intranet, the public Internet or any other type of network configured to provide a communications path between networked computing devices. The network 106 may also correspond to a combination of one or more LANs, WANs, corporate intranets, and/or the public Internet.

[0096] Client devices 104a and 104b (or any additional client devices) may be any sort of computing device, such as an ordinary laptop computer, desktop computer, network terminal, wireless communication device (e.g., a cell phone or smart phone), and so on. In some embodiments, client devices 104a and 104b can be dedicated to research, but n other embodiments, client devices 104a and 104b can be used as general purpose computers that are configured to perform a number of tasks and need not be dedicated to research. In still other embodiments the functionality of spectra identifier 108 and/or spectra database 110 can be incorporated in a client device, such as client device 104a and/or 104b. In even other embodiments, the functionality of spectra identifier 108 and/or spectra database 110 can be incorporated into mass spectrometer 102.

[0097] Spectra identifier 108 can be configured to receive input spectra from mass spectrometer 102 and/or client device(s) 104a and/or 104b via network 106. In some embodiments, spectra identifier can be configured to directly receive input spectra via data input directly to spectra identifier 108, hard-wired connection(s) to mass spectrometer 102 and/or client device(s) 104a and/or 104(b), accessing storage media configured to store input spectra (e.g., spectra database 110, flash media, compact disc, floppy disk, magnetic tape), and/or any other technique to directly provide input spectra to spectra identifier 108.

[0098] Spectra identifier 108 can be configured to generate results of spectra identification by comparing one or more input spectra to stored spectra 112. For example, stared spectra 112 can be known precursor ion mass spectrometry spectra. As shown in FIG. 4, stored spectra 112 can reside in spectra database 110. When performing spectra identification, spectra identifier 108 can access and/or query spectra database 110 to retrieve part or all of stored spectra 112. In some embodiments, spectra identifier 108 can perform the comparison task directly; while in other embodiments, part or all of the spectra identification task can be performed by spectra database 110, perhaps by executing one or more query language commands upon stored spectra 112.

[0099] While FIG. 4 shows spectra identifier 108 and spectra database 110 directly connected, in other embodiments, spectra identifier 108 can include the functionality of spectra database 110, including storing stored spectra 112. In still other embodiments, spectra identifier 118 and spectra database 110 can be connected via network 106.

[0100] Upon identifying the input spectra, spectra identifier 108 can be configured to provide content at least related to results of spectra identification, as requested by client devices 104a and/or 104b. The content related to results of spectra identification can include, but is not limited to, web pages, hypertext, scripts binary data such as compiled software, images, audio, and/or video. The content can include compressed and/or uncompressed content. The content can be encrypted and/or unencrypted. Other types of content are possible as well.

[0101] A computing device (e.g., system) can be configured to perform one or more steps of the disclosed methods. In accordance with an example embodiment, the computing device performs the functions of mass spectrometer 102, client device 104a, 104b, network 106, spectra identifier 108, spectra database 110, and/or stored spectra 112. The computing device may include a user interface module, a network-communication interface module, one or more processors, and data storage, all of which may be linked together via a system bus, network, or other connection mechanism.

[0102] The computing device use can operate an interface to send data to and/or receive data from external user input/output devices. For example, as shown in FIG. 5, a user interface module 201 can be configured to send and/or receive data to and/or from user input devices such as a keyboard, a keypad, a touch screen, a computer mouse, a track ball, a joystick, a camera, a voice recognition module, and/or other similar devices. User interface modules can also be configured to provide output to user display devices, such as one or more cathode ray tubes (CRT), liquid crystal displays (LCD), light emitting diodes (LEDs), displays using digital light processing (DLP) technology printers, light bulbs, and/or other similar devices, either now known or later developed. User interface modules can also be configured to generate audible output(s), such as a speaker, speaker jack, audio output port, audio output device, earphones and/or other similar devices. The user interface as well as other computer device components can be connected to a network, as shown in FIG. 5.

[0103] Computing processors 203 can include one or more general purpose processors and/or one or more special purpose processors (e.g., digital signal processors, application specific integrated circuits, etc.). Processors can be configured to execute computer-readable program instructions contained in storage and/or other instructions as described herein.

[0104] Data storage 204 can include one or more computer-readable storage media that can be read and/or accessed by at least one or more processors 203. The one or more computer-readable storage media can include volatile and/or non-volatile storage components, such as optical, magnetic, organic or other memory or disc storage, which can be integrated in whole or in part with at least one of processors. In some embodiments, data storage can be implemented using a single physical device (e.g., one optical, magnetic, organic or other memory or disc storage unit), while in other embodiments, data storage can be implemented using two or more physical devices. Data storage can include computer-readable program instructions and perhaps additional data. For example, in some embodiments, data storage can store part or all of a spectra database and/or stored spectra, such as spectra database 110 and/or stored spectra 112, respectively. In some embodiments, data storage can additionally include storage required to perform at least part of the herein-described methods and techniques and/or at least part of the functionality of the herein-described devices and networks.

[0105] In some embodiments, spectra identifier 108 and spectra database 110 can be a single computing device residing in a single computing center. In other embodiments, spectra identifier 108 and/or spectra database 110 can include multiple computing devices in a single computing center, or even multiple computing devices located, in multiple computing centers located, in diverse geographic locations. For example, FIG. 4 depicts each of spectra identifier 108 and spectra database 110 residing in different physical locations.

[0106] In some embodiments, data and services at spectra identifier 108 and spectra database 110 can be encoded as computer readable information stored in tangible computer readable media (or computer readable storage media) and accessible by client devices 104a and 104b, and/or other computing devices. In some embodiments, data at spectra identifier 108 and/or spectra database 110 can be stored on a single disk drive or other tangible storage media, or can be implemented on multiple disk drives or other tangible storage media located at one or more diverse geographic locations.

### EXAMPLES

### Tumor Sample Preparation

[0107] Among many tumor samples, the inventors selected twelve patient's tumor samples based on their estrogen receptor (ER), progesterone receptor (PR), and Her2/Neu expression. Frozen sections were prepared from these twelve samples, stained with Hematoxylin & Eosin, cancer-rich regions located, and cored (FIG. 1A). Proteins from cored tumor samples were then extracted and separated using SDS-PAGE, protein bands from each sample were excised into fifteen gel slices and placed into separate microfuge tubes (FIG. 1E), and tumor-cell derived proteins were in-gel digested into peptides by using trypsin. Once cancer-derived proteins were completely digested, the peptides were extracted from each gel band using a standard peptide extraction buffer (50% Acetonitrile and 5% Formic Acid). The extraction procedure was repeated for four times. Extracted peptides from each gel slice were pooled, loaded onto a C18-reversed phase micro-capillary column using a LC-Packing autosampler. Cancer-derived peptide mixtures from each gel slice were separated using well-established LC-MS/MS procedure as previously described 4. Currently, we have the capacity to analyze analyzed one patient's sample per day using available Finnigan LTQ Ion trap mass spectrometers.

### Cancer Data Sets.

[0108] Data utilized in this investigation came from previous proteomic analyses of multiple cancer tissues and cell cultures, both published and unpublished, including highly enriched tumor cell samples from two pancreatic cancer patients, one hepatocellular carcinoma patient, twelve breast cancer patients, one melanoma patient and one Merkel cell carcinoma patient. Samples from one lymphocytic leukemia cell line, one melanocyte cell line and five melanoma cell lines were also included in the study. Data sets were all converted to a common format before combining lists to obtain unions. The conversion was done by matching previously identified peptides to entries in the UniProt Knowledgebase Release 15.9 (13 Oct. 2009) fasta-format database. UPSP entries were positioned above UPTR entries in the database, and the first match was retrieved as the converted id. The converted protein ids formed the basis of the mutant databases. The following is a brief description of samples representing each cancer type:

[0109] Pancreatic cancer: Highly enriched, tumor cells and adjacent normal cells from two cancer patients (44T/N and 69T/N), subfractionated and analyzed by LC-MS/MS as previously reported, made up the pancreatic data utilized in this study. A total of 2408 unique proteins were identified, in these combined samples.

[0110] Liver cancer: Highly enriched tumor cells and adjacent normal cells from one hepatocellular carcinoma patient (55T/N) provided the hepatocellular data utilized in this study. The proteomic methods used to analyze the hepatocellular sample are the same as those described for the pancreatic cancer samples. The hepatocellular data has not yet been published, but the manuscript is currently in submission. The sample comprises 3142 unique proteins.

[0111] Breast Cancer: Data from LC-MS/MS analyses of 12 breast cancer samples were utilized in this study. Six samples (three ER+ and three ER−) were previously reported, and six samples (three Lobular and three Her2-Neu) are from unpublished work. All samples were prepared and analyzed. The combined samples represent 3243 identified proteins.

[0112] Melanoma/Merkel Cell Carcinoma: One melanoma sample and one Merkel cell carcinoma were derived from the analysis of form paraffin-embedded (FFPE) tissue blocks, prepared as previously described. Additionally, unpublished data from one melanocyte and five melanoma cell lines was used in this study. Standard LC-MS/MS techniques were used for data analysis. Altogether 4085 protein identifications were made from these samples.

[0113] Leukemia: Leukemia is represented by a sample from the human Jurkat T leukemic cell line. This sample has been exhaustively studied by replicate analyses, fractionation, enrichment and depletion techniques. 7876 unique proteins (Release 15.9, 13 Oct. 2009) have been identified in our lab from this human Jurkat T leukemic cell line.

### Mutant Database Creation.

[0114] RAW files from previous proteomic analyses were cony cited to .dat files and re-searched with SEQUEST against mutant databases to identify cancer-specific somatic mutations. For this purpose, five mutant databases, representing each of the five major cancer types investigated in this study, were created from the Uniprot 20091019 trembl and sprot dbs (UniprotKB Release 15.9, Oct. 13, 2009). Within each cancer type, data sets were converted to UniProt Oct. 13, 2009 accession ids and then combined to obtain a union of all identified proteins. Amino acid sequences for these wild type entries were obtained from a local copy of the Uniprot human fasta database (downloaded from ftp.expasy.org). Known missense mutations associated with these wild type entries were retrieved from the UniprotKB xml database, searching feature type ‘sequence variant’ for keywords cancer, carcinoma, melanoma, glioma and tumor. Missense mutations which were identified in our samples were verified to be somatic, cancer-specific mutations by a search of the supporting literature.

[0115] Frameshift deletions, duplications and insertions from published tables for protein-coding regions were then added to the mutant database. For each frameshift mutation, the exact genomic variant which matched the reported mutation in the correct position and for the correct number of nucleotides was found, appropriately modified, and translated into its mutant protein counterpart. Specifically, cDNA isoforms were obtained from web siteexpasy.ch/tools/blast using tblastn, corresponding as sequences were checked against the Uniprot version to find the matching isoform, the DNA sequence was modified in accordance with the frameshift mutation, and the www.expasy.ch/tools/dna.html translate tool was used to obtain a putative protein sequence from the mutated DNA

### Gene Saturation Prediction.

[0116] To obtain rough estimates of the number of samples necessary to identify all mutant genes for each cancer type (FIG. 3), the cumulative number of unique mutant genes (y) was plotted against cumulative total mutant genes (x) as each sample was added to the graph. Genes containing missense mutations, plus deletions, duplications and insertions in the coding region were included in the investigation. Three data models were considered—a theoretical linear model in which no mutant gene overlap was expected between subsequent samples; a best-fit linear model, in which some chance overlap might occur, but no saturation is expected; and a best-fit quadratic model, in which overlap gradually increases and results in eventual saturation. The quadratic model fit the data best for three of the four cancer types, based on a comparison of the sums of squared errors. Thus, a quadratic equation was fitted to each graph in an excel spreadsheet, and saturation was assumed to occur at the point where the slope of the tangent to the graph was equal to 0. X and y values at saturation were computed, and average mutant genes per sample was also calculated. The estimated number of samples necessary to reach saturation was then determined by dividing total mutant genes by the average number of mutant genes per sample.

### Binding Affinity Prediction.

[0117] The artificial neural net (ANN) prediction method available at www.iedb.org was used to predict peptide binding affinities to MHC class I molecules. IC50 is the binding affinity measure utilized by the ANN tool. IC50 is the half-maximal inhibitory concentration, measuring the effectiveness of a compound in inhibiting biological or biochemical function. Thus, a lower score corresponds to a higher affinity. The IEDB web site (www.iedb.org) defines <50 mM as high, 50-500 as intermediate, and >500 as low affinity. All available alleles and lengths of the 23 mutant peptides identified in this study (shown in Table 1) were searched against a human database, and predictions with IC50 <500 were saved. As an example, a comparison of wild type versus mutant affinities is shown for IF4A2 (Q14240) in Table 3.

TABLE 1
Mutant peptides identified by proteomic analysis

| SEQ. | | | | Mutation | Amino | Number of | Mutation | Tissue |
|---|---|---|---|---|---|---|---|---|
| ID. No. | Uniprot ID | Protein name | Mutant Peptide | (codon) | acid | instances | type | type |
| 1 | PS1114 | Fragile X mental retardation syndrome- | R.EDLMGLYIGTHGSNIQQARK.V | 697G > A | A233T | 1 | missense | leukemia |
| | | related protein 1 | | | | | | |
| 2 | Q13813 | Spectrin alpha chain, brain | K.HEAFETNFTVHK.D | 5752G > A | D1918N | 13 | missense | leukemia |
| 3 | O43678 | NADH dehydrogenase [ubiquinone] 1 | K.ANPNLPILIR.E | 148G > A | D50N | 1 | missense | liver |
| | | alpha subcomplex subunit 2 | | | | | | |
| 4 | P02751 | Fibronectin | R.VNVIPVNLPGEHGQR.L | 1818G > A | D940N | 1 | missense | breast |
| 5 | P42771 | Cyclin-dependent kinase inhibitor 2A, | R.RPIQVMMM@GSARVA [symbol] QL [symbol] .R | c.182_207delAGCT | aa | 23 | frameshift | skin |
| | | isoforms 1/2/3 | | GCTGCTGCTCCA | | | | |
| | | | | CGGCGCGGAG | | | | |
| 6 | Q35382 | GTP-binding protein Rheb | K.ALAKSWNAAFLESSA [symbol] .E | c.415G > A | E139K | 3 | missense | breast |
| 7 | P15090 | Fatty acid-binding protein, adipocyte | K.LVSS [symbol] FDDYM [symbol] KDVGVGFAT [symbol] .K | c.69A > C | E23D | 1 | missense | breast |
| 8 | Q16643 | Dretubin | K.SESEV [symbol] AAAIIAQRPDN [symbol] .E | c.832G > A | E278K | 1 | missense | leukemia |
| 9 | P62805 | Histone H4 | R.GVLKVFLQNV [symbol] .D | c.190G > C | E64Q | 8 | missense | liver |
| 10 | P55265 | Double-stranded RNA-specific | K.A [symbol] RMGFTVVIPVTGASLR. [symbol] | c.2417A > T | E806V | 1 | missense | breast |
| | | adenosine deaminase | | | | | | |
| 11 | Q43795 | Myosin-1b | K.ALYPSSVGQPFQGAYLKINK.N | c.2905G > A | E969K | 7 | missense | liver |
| 12 | Q9NWD1 | 3-oxoacyl-[acyl-carrier-protein] | R.GSDEGQFNEQNIVSK.S | c.316T > A | F106I | 2 | missense | breast |
| | | synthase, mitochondrial | | | | | | |
| 13 | Q8WZ42 | Titin | K.FLFNTFTVLAGEDLK.V | aa | L23079F | 6 | missense | breast |
| 14 | P30622 | CAP-Gly domain-containing linker | K.LEEERSVLNNQLL [symbol] K.K | c.3606G > A | M1213I | 1 | missense | breast |
| | | [symbol] | | | | | | |
| 15 | Q60566 | Mitotic checkpoint serine/threonine- | K.EGGALSEATSLEGDEWELSK.E | c.44T > C | M15T | 2 | missense | liver |
| | | protein kinase BUB1 beta | | | | | | |
| 16 | Q91888 | Rho guanine nucleotide exchange factor | K.RLM#GVIPWEQELAQLEAWVGR.D | c.493A > G | M165V | 1 | missense | breast |
| | | 1 | | | | | | |
| 17 | Q8W242 | Titin | K.KVDLIQDLPR.V | c.5664 [symbol] G > A | R18881K | 5 | missense | breast |
| 18 | Q13315 | Serine-protein kinase ATM | R.YTVKVQQELELDELALR.A | c.7328G > A | R1443Q | 1 | missense | skin |
| 19 | P03164 | Myeloperoxidase | R.LYQEAQKIVGAM@VQ [symbol] TYR.D | c.1340G >10 A | R447Q | 2 | missense | liver |
| 20 | P47989 | Xanthine dehydrogenase/oxidase | K.MLGVPANRIVVGVK.R | c.2371C > G | R791G | 8 | missense | breast |
| 21 | P78527 | DNA-dependent protein kinase catalytic | K.QLFNSLFSGILK.E | c.8429G > A | S2810N | 1 | missense | breast |
| | | subunit | | | | | | |
| 22 | Q13813 | Spectrin alpha chain, brain | R.RQDLEDSLQAQQYFADANEAECWM@R.E | c.2711C > G | S904C | 3 | missense | leukemia |
| 23 | Q14240 | Eukaryotic initiation factor 4A-II | K.MFLLDEADEMLSR.G | c.541G > C | V181L | 3 | missense | breast |

[symbol]

indicates data missing or illegible when filed

TABLE 2
Wild Type Amino Acid Sequences of Whole Proteins Identified

| SEQ ID | Protein (gene) | Amino Acid Sequence |
|---|---|---|
| 24 | Fragile X mental | MAELTVEVRGSNGAFYKGFIKDVHEDSLTVVFENNWQPERQVPFNEVRLPPPPDIKKEIS |
| | retardation syndrome- | EGDEVEVYSRANDQEPCGWWLAKVRMMKGEFYVIEYAACDATYNEIVTFERLRPVNQNKT |
| | related protein 1 | VKKNTFFKCTVDVPEDLREACANENAHKDFKKAVGACRIFYHPETTQLMLSASEATVKR |
| | (FXR1) | VNILSDMHLRSIRTKLMLMSRNEEATKHLECTKQLAAAFHEEFVVREDLMGLAIGTHGSN |
| | | IQQARKVPGVTAIELDEDTGTFRIYGESADAVKKARGFLEPVEDFIQVPRNLVGKVIGKN |
| | | GKVIQEIVDKSGVVRVRIEGDNENKLPREDGMVPFVFVGTKESIGNVQVLLEYHIAYLKE |
| | | VEQLRMERLQIDEQLRQIGSRSYSGRGRGRRGPNYTSGYGTNSELSNPSETESERKDELS |
| | | DWSLAGEDDRDSRHQRDSRRRPGGRGRSVSGGRGRGGPRGGKSSLSSVLKDPDSNPYSLL |
| | | DNTESDQTADTDASESHHSTNRRRRSRRRRTDEDAVLMDGMTESDTASVNENGLVTVADY |
| | | ISRAESQSRQRNLPRETLAKNKKEMAKDVIEEHGPSEKAINGPTSASGDDISKLQRTPGE |
| | | EKINTLKEENTQEAAVLNGVS |
| 25 | Spectrin alpha | MDPSGVKVLETAEDIQERRQQVLDRYHRPKELSTLRRQKLEDSYRPQPPQRDAEELEKWI |
| | chain, brain | QEKLQIASDENYKDPTNLQGKLQKHQAFEAEVQANSGAIVKLDETGNLMISEGHFASETI |
| | (SPTANI) | RTRLMELHRQWELLLEKMREKGIKLLQAQKLVQYLRECEDVMDWINDKEAIVTSEELGQD |
| | | LEHVEVLQKKFEEFQTDMAAHEERVNEVNQFAAKLIQEQHPEEELIKTKQDEVNAAWQRL |
| | | KGLALQRQGKLFGAAEVQRFNRDVDETISWIKEKEQLMASDDPGRDLASVQALLRKHEGL |
| | | ERDLAALEDKVKALCAEADRLQQSHPLSATQIQVKREELITNWEQIRTLAAERHARINDS |
| | | YRLQRFLADFRDLTSWVTEMKALINADELASDVAGAEALLDRHQEHKGEIDAHEDSFKSA |
| | | DESGQALLAAGHYASDEVREKLTVLSEERAALLELWELRRQQYEQCMDLQLFYRDTEQVD |
| | | NWMSKQEAFLLNEDLGDSLDSVEALLKKHEDPEKSLSAQEEKITALDEFATKLIQNNHYA |
| | | MEDVATRRDALLSRRNALHERAMRRRAQLADSPHLQQFFRDSDELKSWVNEKMKTATDEA |
| | | YKDPSNLQGKVQKHQAFEAELSANQSRIDALEKAGQKLIDVNHYAKDEVAARMEVISLW |
| | | KKLLEATELKGIKLREANQQQQFNRNVEDIELWLYEVEGHLASDDYGKDLTNVQNLQKKH |
| | | ALLEADVAAHQDRIDGITIQARQFQDAGHFDAENIKKKQEALVARYEALKEPMVARKQKL |
| | | ADSLRLQQLFRDVEDEETWTREKEPIAASTNRGKDLIGVQNLLKKHQALQAEIAGHEPRI |
| | | KAVTQKGNAMVEEGHFAAEDVKAKLHELNQKWEALKAKASQRRQDLEDSLQAAQQYFADAN |
| | | EAESWMREKEPIVGSTDYGKDEDSAEALLKKHEALMSDLSAYGSSIQALREQAQSCRQQV |
| | | APTDDETGKELVLALYDYQEKSPREVTMKKGDILTLLNSTNKDWWKVEVNDRQGFVPAAY |
| | | VKKLDPAQSASRENLLEEQGSIALRQEQIDNQTRITKEAGSVSLRMKQVEELYHSLLELG |
| | | EKRKGMLEKSCKKFMLFREANELQQWINEKEAALTSEEVGADLEQVEVLQKKPDDFQKDL |
| | | KANESRLKDINKVAEDLESEGLMAEEQAVQQQEVYGMMPRDETDSKTASPWKSARLMVH |
| | | TVATFNSIKELNERWRSLQQLAEERSQLLGSAHEVQRFHRDADETKEWIEEKNQALNTDN |
| | | YGHDLASVQALQRKHEGFERDLAALGDKVNSLGETAERLIQSHPESAEDLQEKCTELNQA |
| | | WSSLGKRADQRKAKLGDSHDLQRFLSDFRDLMSWINGIRGLVSSDELAKDTGAEALLER |
| | | HQEHRTEIDARAGTFQAFEQFGQQLLAHGHYASPEIKQKLDILDQERADLEKAWVQRRMM |
| | | LDQCLELQLFHRDCEQAENWMAAREAFLNTEDKGDSLDSVEALIKKHEDPDKAINVQEEK |
| | | IAALQAFADQLIAAGHYAKGDISSRRNEVLDRWRRLKAQMIEKRSKLGESQTLQQFSRDV |
| | | DEIEAWISEKLQTASDESYKDPTNIQSKHQKHQAFEAELHANADRIRGVIDMGNSLIERG |
| | | ACAGSEDAVKARLAALADQWQFLVQKSAEKSQKLKEANKQQNFNTGIKDFDFWLSEVEAL |
| | | LASEDYGKDLASVNNLLKKHQLLEADISAHEDRLKDLNSQADSLMTSSAFDTSQVKDKRD |
| | | TINGRFQKIKSMAASRRAKLNESHRLHQFFRDMDDEESWIKEKKLLVGSEDYGRDLTGVQ |
| | | NLRKKHKRLEAELAAHEPAIQGVLDTGKKLSDDNTIGKEEIQQRLAQFVEHWKELKQLAA |
| | | ARGQRLEESLEYQQFVANVEEEEAWINEKMTLVASEDYGDTLAAIQGLLKKHEAFETDPT |
| | | VHKDRVNDVCTNGQDLIKKNNHHEENISSKMKGLNGKVSDLEKAAAQRKAKLDENSAFLQ |
| | | PNWKADVVESWIGEKENSLKTDDYGRDLSSVQTLLTKQETPDAGLQFQQEGIANITALK |
| | | DQLLAAKHVQSKAIEARHASLMKRWSQLLANSAARKKKLLEAQSHFRKVEDLEFLTFAKKA |
| | | SAFNSWFENAEEDLTDPVRCNSLEEIKALREAHDAFRSSLSSAQADFNQLAELDRQIKSF |
| | | RVASNPYTWFTMEALEETWRNLQKIIKERELELQKEQRRQEENDKLRQEFAQHANAPHQW |
| | | IQETRTYLLDGSCMVEESGTLESQLEATKRKHQHRAMRSQLKKIEDLGAAMEEALILDN |
| | | KYTEHSTVGLAQQWDQLDQLGMRMQHNLEQQIQARNTTGVTEEALKEFSMMPKHFDKDKS |
| | | GRLNHQEFKSCLRSLGYDLPMVEEGEPDPEPEAILDTVDPNRDGHVSLQEYMAFMISRET |
| | | ENVKSSEEIESAPRALSSEGKPYVTKEELYQNLTREQADYCVSHMKPYVDGKGRELPTAF |
| | | DYVEFTRSLFVN |
| 26 | NADH dehydrogenase | MAAAAASRGVGAKLGLREIRIHLCQRSPGSQGVRDPIEKRYVELKKANPDLPILIRECSD |
| | [ubiquinone] 1 alpha | VQPKLWARYAPGQETNVPLNNPSADQVTRALENVLSGKA |
| | subcomplex subunit 2 | |
| | (NDUFA2) | |
| 27 | Fibronectin (FN1) | MLRGPGPGLLLLAVQCLGTAVPSTGASKSKRQAQQMVQPQSPVAVSQSKPGCYDNGKHYQ |
| | | INQQWERTYLGNALVCTCYGGSRGFNCESKPEAEETCFDKYTGNTYRVGDTYERPKDSMI |
| | | WDCTCIGAGEGRISCHANRCHEGGQSYKIGDTWRRPHETGGYMLECVCLGNGKGEWTCK |
| | | PIAEKCFDHAAGTSYVVGETWEKPYQGWMMVDCTCLGEGSGRITCTSRNRCNDQDTRTSY |
| | | RIGDTWSKKDNRGNLLQCICTGNGRGEWKCERHTSVQTTSSGSGPFTDVRAAVYQPQPHP |
| | | QPPPYGHCVTDSGVVYSVGMQWLKTQGNKQMLCTCLGNGVSCQETAVTQTYGGNSNGEPC |
| | | VLPFTYNGRTFYSCTTEGRQDGHLWCSTTSNYEQDQKYSFCTDHTVLVQTRGGNSGALC |
| | | HFPFLYNNHNYTDCTSEGRRDNMKWCGTTQNYDADQKFGFCPMAAHEEICTTNEGVMYRI |
| | | GDQWDKQHDMGHMMRCTCVGNGRGEWTCIAYSQLRDQCIVDDITYNVNDTFHKRHEEGHM |
| | | LNCTCPGQGRGRWKCDPVDQCQDSETGTFYQIGDSWEKYVHGVRYQCYCYGRGIGEWHCQ |
| | | PLQTYPSSSGPVEVFITETPSQPNSHPIQWNAPQPSHISKYILRWRPKNSVGRWKEATIP |
| | | GHLNSYTIKGLKPGVVYEGQLISIQQYGHQEVTRFDFTTTSTSTPVTSNTVTGETTPFSP |
| | | LVATSESVTEITASSPVVSWVSASDTVSGFRVEYELSEEGDEPQYLDLPSTATSVNIPDL |
| | | LPGRKYIYNVYQISEDGEQSLILSTSQTTAPDAPPDTTVDQVDDTSIVVRWSRPQAPITG |
| | | YRIVYSPSVEGSSTELNLPETANSVTLSDLQPGVQYNHIYAVEENQESTPVVIQQETTG |
| | | TPRSDTVPSPRDLQFVEVTDVKVHMWTPPESAVIGYRVDVIPVNLPGEHGQRLPISRNT |
| | | FAEVIGLSPGVTYYFKVFAVSHGRESKPLTAQQTTKLDAPTNLQFVNETDSTVLVRWTPP |
| | | RAQITGYRLTVGLTRRGQPRQYNVGPSVSKYPLRNLQPASEYTVSLVAIKGNQESPKATG |
| | | VFTTLQPGSSIPPYNTEVTETTIVITWTPAPRIGFKLGVRPSQGGEAPREVTSDSGSIVV |
| | | SGLTPGVEYVYTIQVLRDGQERDAPIVNKVVTPLSPPTNLHLEANPDTGVLTVSWERSIT |
| | | PDITGYRITTTPTNGQQGNSLEEVVHADQSSCTFDNLSPGLEYNVSVYTVKDDKESVPIS |
| | | DTHPAVPPPTDLRFTNIGPDTMRVTWAPPPSIDLTNFLVRYSPVKNEEDVAELSISPSD |
| | | NAVVLTNLLPGTEYVVSVSSVYEQHESTPLRGRQKTGLDSPTGIDFSDITANSFTVHWLA |
| | | PRATTTGYRIRHHPEHFSGRPREDRVPHSRNSHLTNLTPGTEYVVSIVALNGREESPLL |
| | | IGQQSTVSDVPRDLEVVAATPTSLLISWDAPAVTVRYYRITYGETGGNSPVQEFTVPGSK |
| | | STATISGLKPGVDYTITVYAVTGRGDSPASSKPISINYRTEIDKPSQMQVTDVQDNSISV |
| | | KWLPSSSPVTGYRVTTTPKNGPGPIKTKTAGPDQTEMTIEGLQPTVEYVVSVYAQNPSGE |
| | | SQPLVQTAVTNIDRPKGLAFTDVDVDSIKIAWESPQGQVSRYRVTYSSPEDGIHELFPAP |
| | | DGEEDTAELQGLRPGSEYTVSVVALHDDMESQPLIGTQSTAIPAPTDLKFTQVTPTSLSA |
| | | QWTPPNVQLTGYRVRVTPKEKTGPMKEINLAPDSSSVVVSGLMVATKYEVSVYALKDTLT |
| | | SRPAQGVVTTLENVSPRRARVTDATETTHTSWRTETTTGFQVDAVPANGQTPIQRT |
| | | IKPDVRSYTTTGLQPGTDYKIYLYTLNDNARSSPVVIDASTAIDAPSNLRFLATTPNSLL |
| | | VSWQPPRARITGYHKYEKPGSPPREVVPRPRPGVTEATTTGLEPGTEYTIYVIALKNNQ |
| | | KSEPLIGRKKTDELPQLVTLPHPNLHGPEILDVPSTVQKTPPVTHPGYDTGNGIQLPGTS |
| | | GQQPSVGQQMIFEEHGFRRTTPPTTATPIRHRPRPYPFNVGEEIQIGHIPREDVDYHLYP |
| | | HGPGLNPNASTGQEALSQTTISWAPFQDTSEYHSCHPVGTDEEPLQFRVPGTSTSATLT |
| | | GLTRGATYNVIVEALKDQQRHKVREEVVTVGNSVNEGLNQPTDDSCFDPYTVSHYAVGDE |
| | | WERMSESGFKLLCQCLGFGSHFRCDSSRWCHDNGVNYKIGEKWDRQGENGQMMSCTCLG |
| | | NGKGEFKCDPHEATCYDDGKTYHVGEQWQKEYLGAICSCTCPGGQRGWRCDNCRRPGGEP |
| | | SPEGTTGQSYNQYSQRYHQRTNTNVNCPHECFMPLDVQADREDSRE |
| 28 | Cyclin-dependent kinase | MEPAAGSSMEPSADWLATAAARGRVEEVRALLEAGALPNAPNSYGRRPIQVMMMGSARVA |
| | inhibitor 2A, | ELLLLHGAEPNCADPATLTRPVHDAAREGFLDTLVVLHRAGARLDVRDAWGRLPVDLAEE |
| | isoforms 1/2/3 | LGHRDVARYLRAAAGGTRGSNHARIDAAEGPSDIPD |
| | (CDKN2A) | |
| 29 | GTP-binding protein Rheb | MPQSKSRKIAILGYRSVGKSSLTIQFVEGQFVDSYDPTIENTFTKLITVNGQEYHLQLVD |
| | (RHEB) | TAGQDEYSIFPQTYSIDINGYILVYSVTSIKSFEVIKVIHGKLLDMVGKVQIPMLVGNK |
| | | KDLHMERVISYEEGKALAESWNAAFLESSAKENQTAVDVFRRHLEAEKMDGAASQGKSS |
| | | CSVM |
| 30 | Fatty acid-binding | MCDAFVGTWKLVSSENFDDYMKEVGVGFATRKVAGMAKPNMHSVNGDVHIKSESTFKN |
| | protein, adipocyte | TEISFILGQEFDEVTADDRKVKSTTTLDGGVLVHVQKWDGKSTTIRRKREDDKLVVECVM |
| | (FABP4) | KGVTSTRVYERA |
| 31 | Drebrin (DBN1) | MAGVSFSGHRLELLAAYEEVIREESAADWALYIYEDGSDDLKLAASGEGGLQELSGHFEN |
| | | QKVMYGFCSVKDSQAALPKYVLINWVGEDVPDARKCACASHVAKVAEFFQGVDVIVNASS |
| | | VEDIDAGAIGQRLSNGLARLSSPVLHRLRLREDENAEPVGTTYQKTDAAVEMKRINREQF |
| | | WEQAKKEEELRKEEERKKALDERLRFEQERMEQERQEQEERERRYREREQQIEEHRRKQQ |
| | | TLEAEEAKRRLKEQSIFGDHRDEEEETHMKKSESEVEEAAAILAQRPDNPREFFKQQERV |
| | | ASASAGSCDVPSPPNHRPGSHLDSHRRMAPTPIPTRSPSDSSTASTPVAEQIERALDEVT |
| | | SSQPPPLPPPPPPAQETQEPSILDSEETRAAAPQAWAGPMEEPPQAQPPRGPGSPAED |
| | | LMFMESAEQAVLAAPVEPATADATEIHDAADTIETDTATADTTVANNVPPAATSLIDLWP |
| | | GNGEGASTLQGEPRAPTPPSGTEVTLAEVPLLDEVAPEPLLPAGEGCATLLNFDELPEPP |
| | | ATFCDPEEVEGESLAAPQTPTLPSALEELEQEQEPEPHLLTNGETTQKEGTQASEGYFSQ |
| | | SQEEEFAQSEELCAKAPPPVFYNKPPEIDITCWDADPVPEEEEGFEGGD |
| 32 | Histone H4 (HIST1H4) | MSGRGKGGKGLGKGGAKRHRKVLRDNIQGITKPAIRRLARRGGVKRISGLIYEETRGVLK |
| | | VFLENVIRDAVTYIEHAKRKTVTAMDVVYALKRQGRTLYGFGG |
| 33 | Double-stranded RNA- | MNPRQGYSLSGYYTHPFQGYEHRQLRYQQPGPGSSPSSFLLKQIEFLKGQLPEAPVIGKQ |
| | specific adenosine | TPSLPPSLPGLRPRFPVLLASSTRGRQVDIRGVPRGVHLRSQGLARGFQHPSPRGRSLPQ |
| | deaminase (ADAR) | RGVDCLSSHFQELSIYQDQEQRILKFLEELGEGKATTAHDLSGKLGTPKKEINRVLYSLA |
| | | KKGKLQKEAGTPPLWKIAVSTQAWNQHSGVVRPDGHSQGAPNDSPSLEPEDRNSTSVSED |
| | | LLEPFIAVSAQAWNQHSGVVRPDSHSQGSPNSDPGLEPEDSNSTSALEDPLEFLEMAEIK |
| | | EKICDYLFNVSDSSALNLAKNIGLTKARDINAVLIDMERQGDVYRQGTTPPIWHLTDKKR |
| | | ERMQIKRNTNSVPETAPAAIPETKRNAEPLTCNIPTSNASNNMVTTEKVENGQEPVIKLE |
| | | NRQEARPEPARLKPPVHYNGPSKAGYVDFENGQWATDDIPDDLNSIRAAPGEFRAIMEMP |
| | | SFYSHGLPRCSPYKKLTECQLKNPISGLLFYAQFASQTCEFNMIEQSGPPHEPRFKFQVV |
| | | INGREFPPAEAGSKKVAKQDAAMKAMTILEEAKAKDSGKSEESSHYSTEKESEKTAESQ |
| | | TPIPSATSFPSGKSPVTTLLECMHKLGNCEFRLLSKEGPAHEPKPQYCVAVGAQTFPSV |
| | | SAPSKKVAKQMAAEEAMKALHGFATNSMASDNQPEGMISELDNLESMMPNKVRKIGELV |
| | | RYLNTNPVGGLEYARSHGPAAEFKLVDQSGPPHEPKFVYQAKVGGRWFPAVCAHSKKQG |
| | | KQEAADAALRVLIGENEKAERMGFTEVTPVTGASLRRTMLLLSRSPEAQPKTLPLTGSTF |
| | | HDQIAMLSHRCFNTLTNSFQPSLIGRKILAAHMKKDSEDMGVVVSLGTGNRCVKGDSLS |
| | | LKGETVNDCHAEHSRRGFIRFLYSELMKYNSQTAKDSIFEPAKGGEKLQIKKTVSFHLY |
| | | ISTAPCGDGALPDKSCSDRAMESTESRHYPVFENPKQGKLRTKVENGEGTIPVESSDIVP |
| | | TWDGIRLGERLRTMSCSDKILRWNVLGLQGALLTHFLQPIYLKSVTLGYLPSQGHLTRAI |
| | | CCRVTRDGSAFEDGLRHPFTVNHPKVGRVSIYDSKRQSGKTKETSVNWCLADGYDLEILD |
| | | GTRGTVDGPRNELSEVSKKNIFLLFKKLCSFRYRRDLLRLSYGEAKKAARDYETAKNYFK |
| | | KGLKDMGYGNWISKPQEEKNFYLCPV |
| 34 | Myosin-Ib (MYOIB) | MAKMEVKTSLLDNMIGVGDMVLLEPLNEETFINNLKKRFDHSEIYTYIGSVVISVNPYRS |
| | | LPIYSPEKVEEYRNRNFYELSPHIFALSDEAYRSLRDQDKDQCILITGESGAGKTEASKL |
| | | VMSYVAAVCGKGAEVNQVKEQLLQSNPVLEAFGNAKTVRNDNSSRFGKYMDIEFDFKGDP |
| | | LGGVISNYLLEKSRVVKQPRGERNFHVFYQLLSGASEELLNKLKLERDFSRYNYLSLDSA |
| | | KVNGVDDAANFRTVRNAMQIVGFMDHEAESVLAVVAAVLKLGNIEFKPESRVNGLDESKI |
| | | KDKNELKEICELTGIDQSVLERAFSPRTVEAKQEKVSTTLNVAQAYYARDALAKNLYSRL |
| | | FSWLVNRINESIKAQTKVRKKVMGVLDIYGPEIFEDNSFEQFIINYCNEKLQQIFIELTL |
| | | KEEQEEYIREDIEWTHIDYFNNAIICDLIENNTNGILAMLDEECLRPGTVTDETFLEKLN |
| | | QVCATHQHFESRMSKCSRFLNDTSLPHSCFRIQHYAGKVLYQVEGFVDKNNDLLYRDLSQ |
| | | AMWKASHALIKSLFPEGNPAKINLKRPPTAGSQFKASVATLMKNLQTKNPNYIRCIKPND |
| | | KKAAHIFNEALVCHQIRYLGLLENVRVRRAGYAFRQAYEPCLERYKMLCKQTWPHWKGPA |
| | | RSGVEVLFNELEIPVEEYSFGRSKIFIRNPRTLPKLEDLRKQRLEDLATLIQKIYRGWKC |
| | | RTHFLLMKKSQIVIAAWYRRYAQQKRYQQTKSSALVIQSYIRGWKARKILRELKHQKRCK |
| | | EAVITIAAYWHGTQARRELRRLKEEARNKHAIAVIWAYWLGSKARRELKRLKEEARRKHA |
| | | VAVIWAYWLGLKVRREYRKFFRANAGKKIYEFTLQRIVQKYFLEMKNKMPSLSPIDKNWP |
| | | SRPYLFLDSTHKELKRIFHLWRCKKYRDQFTDQQKLIYEEKLEASELFKDKKALYPSSVG |
| | | QPFQGAYLEINKNPKYKKLKDAIEEKIIIAEVVNKINRANGKSTSRIPLLTNNNLLLADQ |
| | | KSGQIKSEVPLVDVTKVSMSSQNDGFFAVHLKEGSEAASKGFDLFSSDHLIEMATKLYRT |
| | | TLSQTKQKLNIEISDEFLQFRQDKVCVKFIQGNQKNGSVPTCKRKNNRLLEVAVP |
| 35 | 3-oxoacyl-[acyl-carrier- | MSNCLQNFLKITSTRLLCSRLCQQLRSKRKFFGTVPISRLHRRVVITGIGLVTPLGVGTH |
| | protein] synthase, | LVWDRLIGGESGIVSLVGEEYKSIPCSVAAYVPRGSDEGQFNEQNFYSKSDIKSMSSPTI |
| | mitichondrial (OXSM) | MAIGAAELAMKDSGWHPQSEADQVATGVAIGMGMIPLEVVSETALNFQTKGYNKVSPFFV |
| | | PKILVNMAAGQVSIRYKLKGPNHAVSTACTTGAHAVGDSFRFIAHGDADVMVAGGTDSCI |
| | | SPLSLAGFSRARALSTNSDPKLACRPFHPKRDGFVMGEGAAVLVLEEYEHAVQRRARIYA |
| | | EVLGYGLSGDAGHITAPDPEGEGALRCMAAALKDAGVQPEEISYINAHATSTPLGDAAEN |
| | | KAIKHLFKDHAYALAVSSTKGATGHLLGAAGAVEAAFTTLACYYQKLPPTLNLDCSEPEF |
| | | DLNYVPLKAQEWKTEKRFIGLTNSFGPGGTNATLCIAGL |
| 36 | Titin (TTN) | MTTQAPTFTQPLQSVVVLEGSTATEEAHISGFPVPEVSWFRDGQVISTSTLPGVQISFSD |
| | | GRAKLTIPAVTKANSGRYSLKATNGSGQATSAELLVKAETAPPNFVQRLQSMTVRQGSQ |
| | | VRLQVRVTGIPTPVVKPYRDDGAEIQSSLDFQISQEGDLYSLLIAEAYPEDSGTYSVNATN |
| | | SVGRATSTAELLVQGEEEVPAKKTKTIVSTAQISESRQTRIEKKIEAHFDARSIATVEMV |
| | | IDGAAGQQLPHKTPHRIPPKPKSRSPTPPSIAAKAQLARQQSPSPIRHSPSPVRHVRAPT |
| | | PSPVRSVSPAARISTSPITSVRSPLLMKKTQASTVATGPEVPPPWKQEGYYVASSSEAEMR |
| | | ETTLTISTQIRTEERWEGRYGVQEQVTISGAAGAAASVSASASYAAEAVATGAKEVKQDA |
| | | DKSAAVATVVAAVDMARVREPVISAVEQTAQRTTTTAVHIQPAQEQVRKEAEKTAVTKVV |
| | | VAADKAKEQELKSRTKEVITTKQEQMHVTHEQIRKETEKTFVPKVVISAAKAKEQETRIS |
| | | EEITKKQKVTQEAIRQETEITAASMVVVATAKSTKLETVPGAQEETTTQQDQMHLSYEK |
| | | IMKETRKTVVPKVIVATPKVKEQDLVSRGREGITTKREQVQITQEKMRKEAEKTALSTIA |
| | | VATAKAKEQETILRTRETMATRQEQIQVTHGKVDVGKKAEAVATVVAAVDQARVREPREP |
| | | GHLEESYAQQTTLEYGYKERISAAKVAEPPQRPASEPHVVPKAVKPRVIQAPSETHIKTT |
| | | DQKGMHISSQIKKTTDLTTERLVHVDKRPRTASPHFTVSKISVPKTEHGYEASIAGSAIA |
| | | TLQKELSATSSAQKITKSVKAPTVKPSETRVRAEPTPLPQFPFADTYKSEAGVEVKK |
| | | EVGVSITGTTVREERFEVLHGREAKVTETARVPAPVEIPVTPPTLVSGLKNVTVIEGESV |
| | | TLECHISGYPSPTVTWYREDYQIESSIDFQITFQSGIARLMIREAFAEDSGRFTCSAVNE |
| | | AGTVSTSCYLAVQVSEEFEKETTAVTEKFTTEEKRFVESRDVVMTDTSLTEEQAGPGEPA |
| | | APYFTTKPVVQKLVEGGSVVFGCQVGGNPKPHVYWKKSGVPLTTGYRYKVSYNKQTGECK |
| | | LVISMTFADDAGEYTIVVRNKHGETSASASLLEEADYELLMKSQQEMLYQTQVTAFVQEP |
| | | KVGETAPGFVYSEYEKEYEKEQALIRKKMAKDTVVVRTYVEDQEFHISSFEERLIKEIEY |
| | | RIIKTTLEELLEEDGEEKMAVDISESEAVESGFDLRIKNYRILEGMGVTFHCKMSGYPLP |
| | | KIAWYKDGKRIKHGERYQMDFLQDGRASLRIPVVLPEDEGIYTAFASNIKGNAICSGKLY |
| | | VEPAAPLGAPTYIPTLEPVSRIRSLSPRSVSRSPIRMSPARMSPARMSPARMSPARMSPG |
| | | RRLEETDESQLERLYKPVFVLKPVSFKCLEGQTARFDLKVVGRPMPETPWFHDGQQIVND |
| | | YTHKVVIKEDGTQSLIIVPATPSDSGEWTVVAQNRAGRSSISVILTVEAVEHQVKPMFVE |
| | | KLKNVNIKEGSQLEMKVRATGNPNPDIVWLKNSDIIVPHKYPKIRIEGTKGEAALKIDST |
| | | VSQDSAWYTATAINKAGRDTTRCKVNVEVEFAEPEPERKLIIPRGTYRAKEIAAPELEPL |
| | | HLRYGQEQWEEGDLYDKEKQQKPFFKKKLTSLRLKRFGPAHFECRLTPIGDPTMVVEWLH |
| | | DGKPLEAANRLRMINEFGYCSLDYGVAYSRDSGIITCRARNKGTDHTSATLIVKDEKSL |
| | | VEESQLPEGEKGLQRIEELERMAHEGALTGVTTDQKEKQKPDIVLYPEPVRVLEGETARP |
| | | RCRVTGYPQPKVNWYLNGQLIRKSKRFRVRYDGIHYLDIVDCKSYDTGEVKVTAENPEGV |
| | | IEHKVKLEIQQREDFRSVLRRAPEPRPEPHVHEPGKLQFEVQKVDRPVDTTETKEVVKLK |
| | | RAERITHEKVPEESEELRSKFKRRTEEGYYEAITAVELKSRKKDESYEELLRKTKDELLH |
| | | WTKELTEEEKKALAEEGKITIPTFKPDKIELSPSMEAPKIFERIQSQTVGQGSDAHFRVR |
| | | VVGKPDPEECWYKNGVKIERSDRIYWYWPEDNVCELVIRDVTAEDSASIMVKAINIAGET |
| | | SSHAFLLVQAKQLITFTQELQDVVAKEKDTMATFECETSEPFVKVKWYKDGMEVHEGDKY |
| | | RMHSDRKVHFLSILTIDTSDAEDYSCVLVEDENVKTTAKLIVEGAVVEFVKELQDIEVPE |
| | | SYSGELECIVSPENIEGKWYHNDVELKSNGKYTTTSRRGRQNLTVKDVTKEDQGEYSFVI |
| | | DGKKTTCKLKMKPRPIAILQGLSDQKVCEGDIVQLEVKVSLESVEGVWMKDGQEVQPSDR |
| | | VHIVIDKQSHMLLIEDMTKEDAGNYSFTIPALGLSTSGRVSVYSVDVTTPLKDVNVIEGT |
| | | KAVLECKVSVPDVTSVKWYLNDEQIKPDDRVQAIVKGTKQRLVINRTHASDEGPYKLIVG |
| | | RVETNCNLSVEKIKIIRGLRDLTCTETQNVVEEVELSHSGIDVLWNFKDKEIKPSSKYKI |
| | | EAHGKIYKLTVLNMMKDDEGKYTFYAGENITSGKLTVAGGAISKPLTDQTVAESQEAVFE |
| | | CEVANPDSKGEWLRDGKHLPLTNNIRSESDGHKRRLIIAATKLDDIGEYTYKVATSKTSA |
| | | KLKVEAVKIKKTLKNLTVTETQDAVFTVELTHPNVKGVQWIKNGVVLESNEKYAISVKGT |
| | | IYSLRIKNCAIVDESVYGFRLGRLGASARLHVETVKIIKKPKDVTALENATVAFEVSVSH |
| | | DTVPVKWFHKNVEIKPSDKHRLVSERKVHKLMLQNISPSDAGEYTAVVGQLECKAKLFVE |
| | | TLHITKTMKNIEVPETKTASFECEVSHFNVPSMWLKNGVEIEMSEKFKIVVQGKLHQLII |
| | | MNTSTEDSAEYTFVCGNDQVSATLTVTPIMITSMLKDINAEEKDIITFEVTVNYEGISYK |
| | | WLKNGVEIKSTDKCQMRTKKLTHSLNIRNVHFGDAADYTFVAGKATSTATLYVEARHIEF |
| | | RKHIKDIKVLEKKRAMFECEVSEPDITVQWMKDDQELQITDRIKIQKEKYVHRLLIPSTR |
| | | MSDAGKYTVVAGGNVSTAKLFVEGRDVRIRSIKKEVQVIEKQRAVVEFEVNEDDVDAHWY |
| | | KDGIEINFQVQERHKYVVERRIHRMFISETRQSDAGEYTFVAGRNRSSVTLYVNAPEPPQ |
| | | VLQELQPVTVQSGKPARFCAVISGRPQPKISWYKEEQLLSTGFKCKFLHDGQEYTLLLIE |
| | | APPEDAAVYTCEAKNDYGVATTSASLSVEVPEVVSPDQEMPVYPPAIITPLQDTVTSEGQ |
| | | PARFQCRVSGTDLKVSWYSKDKKIKPSRFFRMTQFEDTYQLEIAEAYPEDEGTYTFVASN |
| | | AVGQVSSTANLSLEAPESILHERIEQEIEMEMKEFSSSFLSAEEEGLHSAELQLSKINET |
| | | LELLSESPVYSTKFDSEKEGTGPIFIKEVSNADISMGDVATLSVTVIGIPKPKIQWFFNG |
| | | VLLTPSADYKPVFDGDDHSLIILFTKLEDEGEYTCMASNDYGKTICSAYLKINSKGEGHK |
| | | DTETESAVAKSLEKLGGPCPPHFLKELKPIRCAQGLPAIFEYTVVGEPAPTVTWFKENKQ |
| | | LCTSVYYTIIHNPNGSGTFIVNDPQREDSGLYICKAENMLGESTCAAELLVLLEDTDMTD |
| | | TPCKAKSTPEAPEDFPQTPLKGPAVEALDSEQEIATFVKDTILKAALITEENQQLSYEHI |
| | | AKANELSSQLPLGAQELQSILEQDKLTPESTREFLCINGSIHFQPLKEPSPNLQLQIVQS |
| | | QKTFSKEGILMPEEPETQAVLSDTEKIFPSAMSIEQINSLTVEPLKTLLAEPEGNYPQSS |
| | | IEPPMHSYLTSVAEEVLSPKEKTVSDTNREQRVTLQKQEAQSALILSQSLAEGHVESLQS |
| | | PDVMISQVNYEPLVPSEHSCTEGGKILIESANPLENAGQDSAVRIEEGKSLRFPLALEEK |
| | | QVLLKEEHSDNVVMPPDQIIESKREPVAIKKVQEVQGRDLLSKESLLSGIPEEQRLNLKI |
| | | QICRALQAAVASEQPGLFSEWLRNIEKVEVEAVNITQEPRHIMCMYLVTSAKSVTEEVTI |
| | | IIEDVDPQMANLKMELRDALCAIIYEEIDILTAEGPRIQQGAKTSLQEEMDSFSGSQKVE |
| | | PITEPEVESKYLISTEEVSYFNVQSRVKYLDATPVTKGVASAVVSDEKQDESLKPSEEKE |
| | | ESSSESGTEEVATVKIQEAEGGLIKEDGPMIHTPLVDTVSEEGDIVHLTTSITNAKEVNW |
| | | YFENKLVPSDEKPKCLQDQNTYTLVIDKVNTEDHQGEYVCEALNDSGKTATSAKLTVVKR |
| | | AAPVIKRKIEPLEVALGHLAKFTCEIQSAPNVRFQWFKAGREIYESDKCSIRSSKYISSL |
| | | EILRTQVVDCGEYTCKASNEYGSVSCTATLTVTEAYPPTFLSRPKSLTTFVGKAAKFICT |
| | | VTGTPVIETIWQKDGAALSPSPNWKISDAENKHILELSNLTIQDRGVYSCKASNKFGADI |
| | | CQAELIIIDKPHFIKELEPVQSAINKKVHLECQVDEDRKVTVTWSKDGQKLPPGKDYKIC |
| | | FEDKIATLEIPLAKLKDSGTYVCTASNEAGSSSCSATVTVREPPSFVKKVDPSYLMLPGE |
| | | SARLHCKLKGSPVIQVTWFKNNKELSESNTVRMYFVNSEAILDITDVKVEDSGSYSCEAV |
| | | NDVGSDSCSTEIVIKEPPSFIKTLEPADIVRGTNALLQCEVSGTGPFEISWFKDKKQIRS |
| | | SKKYRLFSQKSLVCLEIFSFNSADVGEYECVVANEVGKCGCMATHLLKEPPTFVKKVDDL |
| | | IALGGQTVTLQAAVRGSEPISVTWMKGQEVIREDGKIKMSFSNGVAVLIIPDVQISFGGK |
| | | YTCLAENEAGSQTSVGELIVKEPAKIIERAELIQVTAGDPATLEYTVAGTPELKPKWYKD |
| | | GRPLVASKKYRISFKNNVAQLKFYSAELHDSGQYTFEISNEVGSSSCETTFTVLDRDIAP |
| | | FFTKPLRNVDSVVNGTCRLDCKIAGSLPMRVSWFKDGKEIAASDRYRIAFVEGTASLEII |
| | | RVDMNDAGNFTCRATNSVGSKDSSGALIVQEPPSFVTKPGSKDVLPGSAVCLKSTFQGST |
| | | PLTIRWFKGNKELVSGGSCYIIKEALESSLELYLVKTSDSGTYTCKVSNVAGGVECSANL |
| | | FVKEPATFVEKLEPSQLLKKGDATQLACKVTGTPPIKITWFANDREIKESSKHRMSFVES |
| | | TAVLRLTDVGIEDSGEYMCEAQNEAGSDHCSSIVIVKESPYFTKEFKPIEVLKEYDVMLL |
| | | AEVAGTPPFEITWFKDNTILRSGRKYKTFIQDHLVSLQILKFVAADAGEYQCRVTNEVGS |
| | | SICSARVTLREPPSFIKKIESTSSLRGGTAAFQATLKGSLPIIVTWLKDSDEITEDDNIR |
| | | MTPENNVASLYLSGIEVKHDGKYVCQAKNDAGIQRCSALLSVKEPATITEEAVSIDVTQG |
| | | DPATLQVKFSGTKEITAKWFKDGQELTLGSKYKISVTDTVSILKIISTEKKDSGEYTFEV |
| | | QNDVGRSSCKARINVLDLIIPPSFTKKLKKMDSIKGSFIDLECIVAGSHPISIQWFKDDQ |
| | | EISASEKYKFSFHDNTAFLEISQLEGTDSGTYTCSATNKAGHNQCSGHLTVKEPPYFVEK |
| | | PQSQDVNFNTRVQLKALVGGTAPMTIKWFKDNKELHSGAARSVWKDDTSTSLELFAAKAT |
| | | DSGTYICQLSNDVGTATSKATLFVKEPPQPIKKPSPVLVLRNGQSTTFECQITGTPKIRV |
| | | SWYLDGNEITAIQKHGISFIDGLATFQISGARVENSGTYVCEARNDAGTASCSIELKVKE |
| | | PPTFIRELKPVEVVKYSDVELECEVTGTPPFEVTWLKNNREIRSSKKYTLTDRVSVFNLH |
| | | IIKCDPSDTGEYQCIVSNEGGSCSCSTRVALKEPPSFIKKIENTTTVLKSSATFQSTVAG |
| | | SPPISITWLKDDQILDEDDNVYISFVDSVATLQIRSVDNGHSGRYTCQAKNESGVERCYA |
| | | FLLVQEPAQIVEKAKSVDVTEKDPMTLECVVAGTPELKVKWLKDGKQIVPSRYFSMSFEN |
| | | NVASFRIQSVMKQDSGQYTFKVENDFGSSSCDAYLRVLDQNIPPSFTKKLTKMDKVLGSS |
| | | IHMECKVSGSLPISAQWFKDGKEISTSAKYRLVCHERSVSLEVNNLELEDTANYTCKVSN |
| | | VAGDDACSGILTVKEPPSFLVKPGRQQAIPDSTVEFKAILKGTPPPKIKWFKDDVELVSG |
| | | PKCFIGLEGSTSFLNLYSVDASKTGQYTCHVTNDVGSDSCTTMLLVTEPPKVKKLEASK |
| | | IVKAGDSSRLECKIAGSPEIRVVWFRNEHELPASDKYRMTFIDSVAVIQMNNLSTEDSGD |
| | | FICEAQNPAGSTSCSTKVIVKEPPVFSSFPPIVETLKNAEVSLECELSGTPPFEVVWYKD |
| | | KRQLRSSKKYKIASKNFHTSIHILNVDTSDIGEYHCKAQNEVGSDTCVCTVKLKEPPRFV |
| | | SKLNSLTVVAGEPAELQASIEGAQPIFVQWLKEKEEVIRESENIRITFVENVATLQFAKA |
| | | EPANAGKYICQIKNDGGMEENMATLMVLEPAVIVEKAGPMTVTVGETCTLECKVAGTPEL |
| | | SVEWYKDGKLLTSSQKHKFSFYNKISSLRILSVERQDAGTYTFQVQNNVGKSSCTAVVDV |
| | | SDRAVPPSFTRRLKNTGGVLGASCILECKVAGSSPISVAWFHEKTKIVSGAKYQTTFSDN |
| | | VCTLQLNSLDSSDMGNYTCVAANVAGSDECRAVLTVQEPFSPVKEPEPLEVLPGKNVTFT |
| | | SVIRGTPPFKVNWFRGARELVKGDRCNIYFEDTVAELELFNIDISQSGEYTCVVSNNAGQ |
| | | ASCTTRLFKEPAAFLKRLSDHSVEPGKIILESTYTGTLPISVTWKKDGFNITTSEKCN |
| | | IVTTEKTCILEILNSTKRDAGQYSCEIENEAGRDVCGALVSTLEPPYFVTELEPLEAAVG |
| | | DSVSLQCQVAGTPEITVSWYRGDTKLRPTPETRTYPTNNVATLVFNKVNINDSGEYTCKA |
| | | ENSIGTASSKTVFRIQERQLPPSFARQLKDIEQTVGLPVTLTCRLNGSAPIQVCWYRDGV |
| | | LLRDDENLQTSFVDNVATLKILQTDLSHSGQYSCSASNPLGTASSSARLTAREPKKSPFF |
| | | DIKPVSIDVIAGESADFECHVTGAQPMRITWSKDNKEIRPGGNYTITCVGNTPHLRILKV |
| | | GKGDSGQYTCQATNDVGKDMCSAQLSVKEPPKFVKKLEASKVAKQGESIQLECKISGSPE |
| | | IKVSWFRNDSELHESWKYNMSFINSVALLTINEASAEDSGDYICEAHNGVGDASCSTALT |
| | | VKAPPVFTQKPSPVGALKGSDVILQCEISGTPPFEVVWVKDRKQVRNSKKPKITSKHFDT |
| | | SLHILNLEASDYGEYHCKATNEVGSDTCSCSVKFKEPPRPVKKLSDTSTLIGDAVELRAI |
| | | VEGFQPISVVWLKDRGEVIRESENTRISFIDNIATLQLGSPEASNSGKYICQIKNDAGMR |
| | | ECSAVLTVLEPARIIEKPEPMTVTTGNPFALECVVTGTPELSAKWFKDGRELSADSKHHI |
| | | TFINKVASLKIPCAEMSDKGLYSFEVKNSVGKSNCTVSVHVSDRIVPPSFIRKLKDVNAI |
| | | LGASVVLECRVSGSAPISVGWPQDGNEIVSGPKCQSSFSENVCTLNLSLLEPSDTGIYTC |
| | | VAANVAGSDECSAVLTVQPEPPSFEQTPDSVEVLPGMSLTPISVIRGTPPFKVKWFKGSRE |
| | | LVPGESCNISLEDFVTELELFEVQPLESGDYSCLVTNDAGSASCTTHLFVKEPATFVKRL |
| | | ADFSVETGSPIVLEATYTGTPPISVSWIKDEYLISQSERCSIIMTEKSTILEILESIIED |
| | | YAQYSCLIENEAGQDICEALVSVLEPPYFIEPLEHVEAVIGEPATLQCKVDGTPEIRISW |
| | | YKEHTKLRSAPAYKMQFKNNVASLVINKVDHSDVGEYSCKADNSVGAVASSAVLVIKERK |
| | | LPPFFARKLKDVHETLGFPVAFECRINGSEPLQVSWYKDGVLLKDDANLQTSFVHNVATL |
| | | QILQTDQSHIGQYNCSASNPLGTASSSAKLILSEHEVPPFFDLKPVSVDLALGESGTFKC |
| | | HVTGTAPIKITWAKDNREIRPGGNYKMTLVENTATLTVLKVGKGDAGQYTCYASNIAGKD |
| | | SCSAHLGVQEPPRFIKKLEPSRIVKQDEFTRYECKIGGSPEIKVLWYKDETEIQESSKFR |
| | | MSFVDSVAVLEMHLSVEDSGDYTCEAHNAAGSASSSTSLKVKEPPIFRKKPHPIETLKG |
| | | ADVHLECELQGTPPFHVSWYKDKRELRSGKKYKIMSENFLTSIHILNVDAADIGEYQCKA |
| | | TNDVGSDTCVGSIALKAPPRFVKKLSDISTVVGKEVQLQITIEGAEPISVVWFKDKGEIV |
| | | RESDNIWISYSENIATLQFSRVEPANAGKYTCQIKNDAGMQECPATLSVLEPATIVEKPE |
| | | SIKVTTGDTCTLECTVAGTPELSTKWFKDGKELTSDNKYKISFFNKVSGLKINVAPSDS |
| | | GVYSFEVQNPVGKDSCTASLQVSDRTVPPSFTRKLKETNGLSGSSVVMECKYYGSPPISV |
| | | SWFHEGNEISSGRKYQTTLTDNTCALTVNMLEESDSGDYTCIATNMAGSDECSAPLTVRE |
| | | PPSFVQKPDPMDVLTGTNVTFTSIVKTPPFSVSWFKGSSELVPGDRCNVSLEDSVAELE |
| | | LFDVDTSQSGEYTCIVSNEAGKASCTTHLYIKAPAKFVKRLNDYSIEKGKPLIEGTFTG |
| | | TPPISVTWKKNGINVTPSQRCNITTTEKSAILEIPSSTVEDAGQYNCYIENASGKDSCSA |
| | | QILILEPPYFVKQLEPVKVSVGDSASLQCQLAGTPEIGVSWYKGDTKLRPTTTYKMHFRN |
| | | NVATLVFNQVDINDSGEYICKAENSVGEVSASTFLTVQEQKLPPSFSRQLRDVQETVGLP |
| | | VVFDCAISGSEPISVSWYKDGKPLKDSPNVQTSFLDNTATLNIFKTDRSLAGQYSCTATN |
| | | PIGSASSARLILTEGKNPPFFDIRLAPVDAVVGESADFECHVTGTQPIKVSWAKDSREI |
| | | RSGGKYQISYLENSAHLTVLKVDKGDSGQYTCYAVNEVGKDSCTAQLNIKERLIPPFTK |
| | | RLSETVEETEGNSFKLEGRVAGSQPHVAWYKNNIEIQPTSNCEITFKNNTLVLQVRKAG |
| | | MNDAGLYTCKVSNDAGSALCTSSIVIKEPKKPPVFDQHLTPVTVSEGEYYQLSCHVQGSE |
| | | PIRIQWLKAGREIKPSDRCSFSFASGTAVLELRDVAKADSGDYVCKASNVAGSDTTKSKV |
| | | TIKDKPAVAPATKKAAVDGRLFFVSEPQSIRVVEVKTTATFIAKVGGDPIPNVKWTKGKWR |
| | | QLNQGGRVFIHQKGDEAKLEIRDTTKTDSGLYPCVAFNEHGEIESNVNLQVDERKKQERKI |
| | | EGDLRAMLKKTPILKKGAGEEEEIDIMELLKNVDPKEYEKYARMYGITDFRGLLQAFELL |
| | | KQSQEEETHRLEIEEIERSERDEKEFEELVSFIQQRLSQTEPVTLIKDIENQTVLKDNDA |
| | | VPEIDIKINYPEIKISWYKGTEKLEPSDKPEISIDGDRHTLRVKNCQLKDQGNYRLVCGP |
| | | HIASAKLTVIEPAWERHLQDVTLKEGQTCTMTCQFSVPNVKSEWFRNGRILKPQGRHKTE |
| | | VEHKVHKLTIADVRAEDQGQYTCKYEDETSAELRIEAEPIQFTKRIQNIVVSEHQSATF |
| | | ECFVSFDDAIVTWYKGPTELTESQKYNFRNDGRCHYMTIHNVIPDDEGVYSVIARLEPRG |
| | | EARSTAELYLTTKEIKLELKPPDIPDSRVPIPTMPIRAVPPEEIPPVVAPPIPLLLPTPE |
| | | EKKPPPKRIEVTKKAVKKDAKKVVAKPKEMTPREEIVKKPPPPTTLIPAKAPEIIDVSSK |
| | | AEEVKIMTHRKKEVQKEKEAYYEKKQAVHKEKRVFIESFEEPYDELEVEPYTEPFEQPY |
| | | YEEPDEDYEEIKVEAKKEVHEEWEEDFEEGQEYYEREEGYDEGEEEWEEAYQEREVIQVQ |
| | | KEVYEESHERKVPAKVPEKKAPPPPKVIKKPVIEKIEKTSRRMEEEKVQVTKVPEVSKKI |
| | | VPQKPSRTPVQEEVIEVKVPAVHTKKMVISEEKMFFASHTEEEVSVTVPEVQKEIVTEEK |
| | | IHVAVSKRVEPPPKVPELPEKPAEEVAPVPIPKKVEPPAPKVPEVPKKPVPEEKKPVPV |
| | | PKKEPAAPPKVPEVPKKPVPEEKIPVPVAKKKEAPPAKVPEVQKRVVTEEKITIVTQREE |
| | | SPPPAVPEIPKKKVPEERKPVPRKEEEVPPPPKVPALPKKPVPEEKVAVPVPVAKKAPPP |
| | | RAEVSKKTVVEEKRFVAEEKLSFAVPQRVEVTRHEVSAEEEWSYSEEEEGVSISVYREEE |
| | | REEEEEAEVTEYEVMEEPEEYVVEEKLHIISKRVEAEPAEVTERQEKKIVLKPKIPAKIE |
| | | EPPPAKVPEAPKKIVPEKKVPAPVPKKEKVPPPKVPEEPKKPVPEKKVPPKVIKMEEPLP |
| | | AKVTERHMQTTQEEKVLVAVTKKEAPPKARVPEEPKRAVPEEKVLKLKPKREEEPPAKVT |
| | | EFRKRVVKEEKVSIEAPKREPQPIKEVTIMEEKERAYTLEEEAVSVQREEEYEEYEEYDY |
| | | KEFEEYEPTEEYDQYEEYEEREYERYEEHEEYITEPEKPIPVKPVPEEPVPTKPKAPPAK |
| | | VLKKAVPEEKVPVPIPKKLKPPPPKVPEEPKKVPEEKIRISITKREKEQVTEPAAKVPMK |
| | | PKRVVAEEKVPVPRKEVAPPVRVPEVPKELEPEEVAFEEEVVTHVEEYLVEEEEEYIHEE |
| | | EEFTTEEEVVPVIPVKVPEVPRKPVPEEKKPVPVPKKKEAPPAKVPEVPKKPEEKVPVLI |
| | | PKKEKPPPAKVPEVPKKPVPEEKVPVPVPKKVEAPPAKVPEVPKKPVPEKKVPVPAPKKV |
| | | EAPPAKVPEVPKKLIPEEKKPTPVPKKVEAPPPKVPKKREPVPVPVALPQEEEVLFEEEI |
| | | VPEEEVLPEEEEVLPEEEEVLPEEEEVLPEEEEIPPEEEEVPPEEEYVPEEEEFVPEEEV |
| | | LPEVKPKVPVPAPVPEIKKKVTEKKVVIPKKEEAPPAKVPEVPKKVEEKRIILPKEEEVL |
| | | PVEVTEEPEEEPISEEEIPEEPPSIEEVEEVAPPRVPEVIKKAVPEAPTPVPKKVEAPPA |
| | | KVSKKIPEEKVPVPVQKKEAPPAKVPEVPKKVPEKKVLVPKKEAVPPAKGRTVLEEKVSV |
| | | AFRQEVVVKERLELEYYEAEYEEIPEEEEFHEVEEYFEEGEFHEVEEFIKLEQHRVEEEH |
| | | RVEKVHRVIEVFEAEEVEVFEKPKAPPKGPEISEKIIPPKKPPTKVVPRKEPPAKVPEVP |
| | | KKIVVEEKVRVPEEPRVPPTKVPDVLPPKEYVPEKKVPVPPAKKPEAPPPKVPEAPKEVV |
| | | PEKKVPVPPPKKPEVPPTKVPEVPKAAVPEKKVPEAIPPKPESPPPEVPEAPKEVVPEKK |
| | | VPAAPPKKPEYTPVKVPEAPKEVVPEKKVPVPPPKKPEVPPTKVPEVPKVAVPEKKVPEA |
| | | IPPKPESPPPEVFEEPEEVALEEPPAEVVEEPEPAAPPQVTVPPKKPVPEKKAPAVVAKK |
| | | PELPPVKVPEVPKEVVPEKKVPLVVPKKPEAPPAKVPEVPKEYYPEKKVAVPKKPEVPPA |
| | | KVPEVPKKPVLEEKPAVPVPERAESPPPEVYEEPEEIAPEEEIAPEEEKPVPVAEEEEPE |
| | | VPPPAVPEEPKKIIPEKKVPVIKKPEAPPPKEPEPEKVIEKPKLKPRPPPPPPAPPKEDV |
| | | KEKIFQLKAIPKKKVPEKPQVPEKVELTPLKVPGGEKKVRKLLPERKPEPKEEVVLKSVL |
| | | RKRPEEEEPKVEPKKLEKVKKPAVPEPPPPKPVEEVEVPTVTKRERKIPEPTKVPEIKPA |
| | | IPLPAPEPKPKPEAEVKTIKPPPVEPEPTPIAAPVTVPVVGKKAEAKAPKEEAAKPKGPI |
| | | KGVPKKTPSPIEAERRKLRPGSGGEKPPDEAPFTYQLKAVPLKFVKEIKDIILTESEPVG |
| | | SSAIFECLVSPSTAITTWMKDGSNIRESPKHRFIADGKDRKLHIIDVQLSDAGEYTCVLR |
| | | LGNKEKTSTAKLVVEELPVRFVKTLEEEVTVVKGQPLYLSCELNKERDVVWRKDGKIVVE |
| | | KPGRIVPGVIGLMRALTINDADDTDAGTYTVTVENANNLECSSCVKVVEVIRDWLVKPIR |
| | | DQHVKPKGTAIFACDIAKDTPNIKWFKGYDEIPAEPNDKTEILRDGNHLYLKIKNAMPED |
| | | IAEYAVEIEGKRYPAKLTLGEREVELLKPIEDVTIYEKESASFDAEISEADIPGQWKLKG |
| | | ELLRPSPTCEIKAEGGKRFLTLRKVKLDQAGEVLYQALNAITTAILTVKEIELDFAVPLK |
| | | DVTVPERRQARFECVLTREANVIWSKGPDIIKSSDKFDIIADGKKHILVINDSQFDDEGV |
| | | YTAEVEGKKTSARLFVTGIRLKFMSPLEDQTVKEGETATFVCELSHEKMHVVWFKNDAKL |
| | | HTSRTVLISSEGKTHKLEMKEVTLDDISQIKAQVKELSSTAQLKVLEADPYFTVKLHDKT |
| | | AVEKDEITLKCEVSKDVPVKWFKDGEEIVPSPKYSIKADGLRRILKIKKADLKDKGEYVC |
| | | DCGTDKTKANVTVEARLIKVEKPLYGVEVPVGETAHFEIELSEPDVHGQWKLKGQPLTAS |
| | | PDCEIIEDGKKHILILHNCQLGMTGEVSFQAANAKSAANLKVKELPLIFITPLSDVKVFE |
| | | KDEAKFECEVSREPKTFRWLKGTQEITGDDRFELIKDGTKHSMVIKSAAFEDEAKYMFEA |
| | | EDKHTSGKLIIEGIRLKFLTPLKDVTAKEKESAVFTVELSHDNIRVKWFKNDQRLHTTRS |
| | | VSMQDEGKTHSITFKDLSIDDTSQIRVEAMGMSSEAKLTVLEGDPYFTGKLQDYTGVEKD |
| | | EVILQCEISKADAPVKWFKDGKEIKPSKNAVIKADGKKRMLILKKALKSDIGQYTCDCGT |
| | | DKTSGKLDIEDREIKLVRPLHSVEVMETETARFETEISEDDIHANWKLKGEALLQTPDCE |
| | | IKEEGKIHSLVLHNCRLDQTGGVDFQAANVKSSAHLRVKPRVIGLLRPLKDVTVTAGETA |
| | | TFDCELSYEDIPVEWYLKGKKLEPSDKVVPRSEGKVHTLTLRDVKLEDAGEVQLTAKDFK |
| | | THANLPVKEPPVEFTKPLEDQTVEEGATAVLECEVSRENAKVKWFKNGTEILKSKKYEIV |
| | | ADGRVRKLVIHDCTPEDIKTYTCDAKDFKTSCNLNVVPPHVEFLRPLTDLQVREKEMARF |
| | | ECELSRENAKVKWFKDGAEIKKGKKYDIISKGAVRILVINKCLLDDEAEYSCEVRTARTS |
| | | GMLTVLEEEAVFTKNLANIEVSETDTIKLVCEVSKPGAEVIWYKGDEEIIETGRYEILTE |
| | | GRKRILVIQNAHLEDAGNYNCRLPSSRTDGKVKVHELAAEFISKPQNLEILEGEKAEPVC |
| | | SISKESFPVQWKRDDKTLESGDKYDVIADGKKRVLVVKDATLQDMGTYVVMVGAARAAAH |
| | | LTVIEKLRIVVPLKDTRVKEQQEVVFNCEVNTEGAKAKWFRNEEAIFDSSKYIILQKDLV |
| | | YTLRIRDAHLDDQANYNVSLTNHRGENVKSAANLIVEEEDLRIVEPLKDIETMEKKSVTF |
| | | WCKVNRLNVTLKWTKNGEEVPFDNRVSYRVDKYKHMLTIKDCGFPDEGEYIVTAGQDKSV |
| | | AELLIIEAPTEFVEHLEDQTVTEFDDAVFSCQLSREKANVKWYRNGREIKEGKKYKFEKD |
| | | GSIHRLIIKDCRLDDECEYACGVEDRKSRARLFVEEIPVEIIRPPQDILEAPGADVVFLA |
| | | ELNKDKVEVQWLRNNMVVVQGDKHQMMSEGKIHRLQICDIKPRDQGEYRFIAKDKEARAK |
| | | LELAAAPKIKTADQDLVVDVGKPLTMVVPYDAYPKAEAEWFKENEPLSTKTIDTTAEQTS |
| | | FRILEAKKGDKGRYKIVLQNKHGKAEGFINLKVIDVPGPVRNLEVTETFDGEVSLAWEEP |
| | | LTDGGSKIIGYVVERRDIKRKTWVLATDRAESCEFTVTGLQKGGVEYLFRVSARNRVGTG |
| | | EPVETDNPVEARSKYDVPGPPLNVTITDVNRFGVSLTWEPPEYDGGAEITNYVIELRDKT |
| | | SIRWDTAMTVRAEDLSATVTDVVEGQEYSFRVRAQNRIGVGKPSAATPFVKVADPIERPS |
| | | PPVNLTSSDQTQSSVQLKWEPPLKDGGSPILGYIIERCEEGKDNWIRCNMKLVPELTYKV |
| | | TGLEKGNKYLYRVSAENKAGVSDPSEILGPLTADDAPVEPTMDLSAFKDGLEVIVPNPIT |
| | | ILVPSTGYPRPTATWCFGDKVLETGDRVKMKTLSAYAELVISPSERSDKGIYTLKLENRV |
| | | KTISGEIDVNVIARPSAPKELKFGDITKDSVHLTWEPPDDDGGSPLTGYVVEKREVSRKT |
| | | WTKVMDFVTDLEFTVPDLVQGKEYLFKVCARNKCGPGEPAYVDEPVNMSTPATVPDPPEN |
| | | VKWRDRTANSIFLTWDPPKNDGGSRIKGYIVERCPRGSDKWVACGEPVAETKMEVTGLEE |
| | | GKWYAYRVKALNRQGASKPSRPTEEIQAVDTQEAPEIFLDVKLLAGLTVKAGTKIELPAT |
| | | VTGKPEPKITWTKADMILKQDKRITIENVPKKSTVIIVDSKRSDTGTYIIEAVNVCGRAT |
| | | AVVEVNVLDKPGPPAAFDITDVTNESCLLTWNPPRDDGGSKITNYVVERRATDSEVWHKL |
| | | SSTVKDTNFKATKLIPNKEYIFRVAAENMYGVGEPVQASPITAKYQFDPPGPPTRLEPSD |
| | | ITKDAVTLTWCEPDDDGGSPITGYWVERLDPDTDKWVRCNKMPVKDTTYRVKGLTNKKKY |
| | | RFRVLAENLAGPGKPSKSTEPILIKDPIDPPWPPGKPTVKDVGKTSVRLNWTKPEHDGGA |
| | | KIESYVIEMLKTGTDEWVRVAEGVPTTQHLLPGLMEGQEYSFRVRAVNKAGESEPSEPSD |
| | | PVLCREKLYPPSPPRWLEVINITKNTADLKWTVPEKDGGSPITNYIVEKRDVRRKGWQTV |
| | | DTTVKDTKCTVTPLTEGSLYVFRVAAENAIGQSDYTEIEDSVLAKDTPTTPGPPYALAVV |
| | | DVTKRHVDLKWEPPKNDGGRPIQRYVIEKKERLGTRWVKAGKTAGPDCNFRVTDVIEGTE |
| | | VQFQVRAENEAGVGHPSEPTEILSIEDPTSPPSPPLDLHVTDAGRKHIAIAWKPPEKNGG |
| | | SPIIGYHVEMCPVGTEKWMRVNSRPIKDLKFKVEEGVVPDKEYVLRVRAVNAIGVSEPSE |
| | | ISENVVAKDPDCKPTIDLETHDIIVIEGEKLSIPVPFRAVPVPTVSWHKDGKEVKASDRL |
| | | TMKNDHISAHLEVPKSVRADAGIYTITLENKLGSATASINVKVIGLPGPCKDIKASDITK |
| | | SSCKLTWEPPEFDGGTPILHYVLERREAGRRTYIPVMSGENKLSWTVKDLIPNGEYPFRV |
| | | KAVNKVGGGEYIELKNPVIAQDPKQPPDPPVDVEVHNPTAEAMTITWKPPLYDGGSKIMG |
| | | YIIEKIAKGEERWKRCNEHLVPILTYTAKGLEEGKEYQPRVRAENAAGISEPSRATPPTK |
| | | AVDPIDAPKVILRTSLEVKRGDEIALDASISGSPYPTITWIKDENVIVPEEIKKRAAPLV |
| | | RRRKGEVQEEEPFVLPLTQRLSIDNSKKGESQLRVRDSLRPDHGLYMIKVENDHGIAKAP |
| | | CTVSVLDTPGPPINFVFEDIRKTSVLCKWEPPLDDGGSEIINYTLEKKDKTKPDSEWIVV |
| | | TSTLRHCKYSVTKLIEGKEYLFRVRAENRFGPGPPCVSKPLVAKDPFGPPDAPDKPIVED |
| | | VTSNSMLVKWNEPKDNGSPILGYWLEKREVNSTHWSRVNKSLLNALKANVDGLLEGLTYV |
| | | FRVCAENAAGPGKFSPPSDPKTAHDPISPPGPPIPRVTDTSSTTIELEWEPPAFNGGGEI |
| | | VGYFVDKQLVGTNEWSRCTEKMIKVRQYTVKEIREGADYKLRVSAVNAAGEGPPGETQPV |
| | | TVAEPQEPPAVELDVSVKGGIQIMAGKTLRIPAVVTGRPVPTKVWTKEEGELDKDRVVID |
| | | NVGTKSELIIKDALRKDHGRYVITATNSCGSKFAAARVEVFDVPGPVLDLKPVVTNRKMC |
| | | LLNWSDPEDDGGSEITGFIIERKDAKMHTWRQPIETERSKCDITGLLEGQEYKFRVIAKN |
| | | KFGCGPPVEIGPILAVDPLGPPTSPERLTYTERTKSTTTLDWKEPRSNGGSPIQGYIIEK |
| | | RRHDKPDFERVNKRLCPTTSFLVENLDEHQMYEFRVKAVNHGESEPSLPLNVVIQDDEV |
| | | PPTIKLRLSVRGDTIKVKAGEPVHIPADVTGLPMPKIEWSKNETVIEKPTDALQITKEEV |
| | | SRSEAKTELSIPKAVREDKGTYTVTASNRLGSVFRNVHVEVYDRPSPPRNLAVTDIKAES |
| | | CYLTWDAPLDNGGSEITHYVIDKRDASRKKAEWEEVINTVEKRYGIWKLIPNGQYEFRV |
| | | RAVNKYGISDECKSDKVVIQDPYRLPGPPGKPKVLARTKGSMLVSWTPPLDNGGSPITGY |
| | | WLEKREEGSPYWSRVSRAPITKVGLKGVEFNVPRLLEGVKYQFRAMAINAAGIGPPSEPS |
| | | DPEVAGDPIFPPGPPSCPEVKDKTKSSISLGWKPPAKDGGSPIKGYIVEMQEEGTTDWKR |
| | | VNEPDKLITTCECVVPNLKELRKYRFRVKAVNEAGESEPSDTTGEIPATDIQEEPEVFID |
| | | IGAQDCLVCKAGSQIRIPAVIKGRFTPKSSWEFDGKAKKAMKDGVHDIPEDAQLETAENS |
| | | SVIIIPECKRSHTGKYSITAKNKAGQKTANCRVKVMDVPGPPKDLKVSDITRGSCRLSWK |
| | | MPDDDGGRIKGYVIEKRTIDGKAWTKVNPDCGSTTFVVPDLLSEQQYFFRVRAENRFGI |
| | | GPPVETIQRTTARDPIYPPDPPIKLKIGLITKNTVHLSWKPPKNDGGSPVTHYIVECLAW |
| | | DPTGTKKEAWRQCNKRDVEELQPTVEDLVEGGEYEFRVKAVNAAGVSKPSATVGPCDCQR |
| | | PDMPPSIDLKEFMEVEEGTNVNIVAKIKGVPFPTLTWFKAPPKKPDNKEPVLYDTHVNKL |
| | | VVDDTCTLVIPQSRRSDTGLYTITAVNNLGTASKEMRLNVLGRPGPPVGPIKFESVSADQ |
| | | MTLSWFPPKDDGGSKITNYVIEKREANRKTWVHVSSEPKECTYTIPKLLEGHEYVFRIMA |
| | | QNKYGIGEPLDSEPETARNLFSVPGAPDKPTVSSVTRNSMTVNWEEPEYDGGSPVTGYWL |
| | | EMKDTTSKRWKRVNRDPIKAMTLGVSYKVTGLIEGSDYQPRVYAINAAGVGPASLPSDPA |
| | | TARDPIAPPGPPFRKVTFDWTKSSADLEWSPPLKDGGSKVTGYIVEYKEEGKEEWEKGKDK |
| | | EVRGTKLVVTGLKEGAFYKFRVSAVNIAGIGEPGEVTDVIEMKDRLVSPDLQLDASVRDR |
| | | IVVHAGGVIRIIAYVSGKPPPTVTWNMNERTLPQEATIETTAISSSMVIKNCQRSHQGVY |
| | | SLLAKNEAGERKKTIIVDVLDVPGPVGTPFLAHNLTNESCKLTWFSPEDDGGSPITNYVI |
| | | EKRESDRRAWTPVTYTVTRQNATVQGLIQGKAYFFRIAAENSIGMGPFVETSEALVIREP |
| | | ITVPERPEDLEVKEVTKNTVTLTWNPPKYDGGSEIINYVLESRLIGTEKFNKVTNDNLLS |
| | | RKYTVKGLKEGDTYEYRVSAVNIVGQGKPSFCTKPITCKDELAPPTLHLDFRDKLTIRVG |
| | | EAPALTGRYSGKPKPKVSWFKDEADVLEDDRTHIKTIPATLALEKIKAKRSDSGKYCVVV |
| | | ENSTGSRKGPCQVNVVDRPGPPVGPVSFDEVTKDYMVISWKPPLDDGGSKITNYIIEKKE |
| | | VGKDVWMPVTSASAKTTCKVSKLLEGKDYIFRIHAENLYGISDPLVSDSMKAKDRFRVPD |
| | | APDQPIVTEVTKDSALVTWNKPHDGGKPITNYILEKRETMSKRWARVTKDPIHPYTKFRV |
| | | PDLLEGGCQYEFRVSAENEIGIGDPSPPSKPVFAKDPIAKPSPPVNPEAIDTTCNSVDLTW |
| | | QPPRHDGGSKILGYIVEYQKVGDEEWRRANHTPESCPETKYKVTGLRDGQTYKFRVLAVN |
| | | AAGESDPAHVPEPVLVKDRLEPPELILDANMAREQHIKVGDTLRLSAIIKGVPFPKVTWK |
| | | KEDRDAPTKARIDVTPVGSKLEIRNAAHEDGGIYSLTVENPAGSKTVSVKVLVLDKPGPP |
| | | RDLEVSEIRKDSCYLTWKEPLDDGGSVITNYVVVERRDVASAQWSPLSATSKKKSHFAKHL |
| | | NEGNQYLFRVAAENQYGRGPFVETPKPIKALDPLHPPGPPKDLHHVDVDKTEVSLVWNKP |
| | | DRDGGSPITGYLVEYQEEGTQDWIKFKTVTNLECVVTGLQQGKTYRFRVKAENIVGLGLP |
| | | DTTIPIECQEKLVPPSVELDVKLIEGLVVKAGTTVRPPAIIRGVPVPTAKWTTDGSEIKT |
| | | DEHYTVETDNFSSVLTIKNCLRRDTGEYQITVSNAAGSKTVAVHLTVLDVPGPPTGPINI |
| | | LDVTPEHMTISWQPPKDDGGSPVINYIVEKQDTRKDTWGVVSSGSSKTKLKIPHLQKGCE |
| | | YVFRVRAENKIGVGPPLDSTPIVAKHKFSPPSPPGKPVVTDITENAATVSWTLPKSDGGS |
| | | PITGYYMERREVTGKWVRVNKTPIADLKFRVTGLYEGNTYEFRVFAENLAGSKPSPSSD |
| | | PIKACRPIKPPGPPINPKLKDKSRETADLVWTKPLSDGGSPILGYVVECQKPGTAQWNRI |
| | | NKDELIRQCAFRVPGLIEGNEYRFRIKAANIVGEGEPRELAESVIAKDILHPPEVELDVT |
| | | CRDVITVRVGQTIRILARVKGRPEPDITWTKEGKVLVREKRVDLIQDLPRVELQIKEAVR |
| | | ADHGKYIISAKNSSGHAQGSAIVNVLDRPGPCQNLKVTNVTKENCTISWENPLDNGGSEI |
| | | TNFIVEYRKPNQKGWSIVASDVTKRLIKANLLANNEYYFRVCAENKVGVGPTIETKTPIL |
| | | AINPIDRPGEPENLHIADKGKTFVYLKWRRPDYDGGSPNLSYHVERRLKGSDDWERVHKG |
| | | SIKETHYMVDRCVENQIYEFRVQTKNEGGESDWVKTEEVVVKEDLQKPVLDLKLSGVLTV |
| | | KAGDTIRLEAGVRGKPFPEVAWTKDKDATDLTRSPRVKIDTRADSSKFSLTKAKRSDGGK |
| | | YVVTATNTAGSFVAYATVNVLDKPGPVRNLKIVDVSSDRCTVCWDPPEDDDGGCEIQNYIL |
| | | EKCETKRMVWSTYSATVLTPGTTVTRLIEGNEYIFRVRAENKIGTGPPTESKPVIAKTKY |
| | | DKPGRPDPPEVTKVSKEEMTVVWNPPEYDGGKSITGYFLEKKEKHSTRWVPVNKSAIPER |
| | | RMKVQNLLPDHEYQFRVKAENEIGIGEPSLPSRPVVAKDPIEPPGPPTNFRVVDDTTKHSI |
| | | TLGWGKPVYDGGAPHGYVVEMRPKIADASPDEGWKRCNAAAQLVRKEFTVTSLDENQEY |
| | | EFRVCAQNQVGIGRPAELKEAIKPKEILEPPEIDLDASMRKLVIVRAGCPIRLFAIVRGR |
| | | PAPKVTWRKVGIDNVVRKGQVDLVDTMAFLVIPNSTRDDSGKYSLTLVNPAGEKAVFVNV |
| | | RVLDTPGPVSDLKVSDVTKTSCHVSWAPPENDGGSQVTHYIVEKREADRKTWSTVTPEVK |
| | | KTSFHVTNLVPGNEYYFRVTAVNEYGPGVPTDVPKPVLASDPLSEPDPPRKLEVTEMTKN |
| | | SATLAWLPPLRDGGAKIDGYITSYREEEQPADRWTEYSVVKDLSLVVTGLKEGKKYKPRV |
| | | AARNAVGVSLPREAEGVYEAKEQLLPPKILMPEQITIKAGKKLRIEAHVYGKPHPTCKWK |
| | | KGEDEVVTSSHLAVHKADSSSILIIKDVTRKDSGYYSLTAENSSGTDTQKIKVVVMDAPG |
| | | PPQPPFDISDIDADACSLSWHIPLEDGGSNITNYIVEKCDVSRGDWVTALASVTKTSCRV |
| | | GKLIPGQEYIFRVRAENRFGISEPLTSPKMVAQFPFGVPSEPKNARVTKVNKDCIFVAWD |
| | | RPDSDGGSPIIGYLIERKERNSLLWVKANDTLVRSTEYPCAGLVEGLEYSPRIYALNKAG |
| | | SSPPSKPTEYVTARMPVDPPGKPEVIDVTKSTVSLIWARPKHDGGSKIIGYFVEACKLPG |
| | | DKWVRCNTAPHQIPQEEYTATGLEEKAQYQFRAIARTAVNISPPSEPSDPVTILAENVPP |
| | | RIDLSVAMKSLLTVKAGTNVCLDATVFGKPMPTVSWKKDGTLLKPAEGIKMAMQRNLCTL |
| | | ELFSVNRKDSGDYTITAENSSGSKSATIKLKVLDKPGPPASVKINKMYSDRAMLWEPPL |
| | | EDGGSSEITNYIVDKRETSRPNWAQVSATVPITSCSVEKLIEGHEYQFRICAENKYGVGDP |
| | | VFTEPAIAKNPYDPPGRCDPPVISNITKDHMTVSWKPPADDGGSPHGYLLEKRETQAVN |
| | | WTKVNRKPIIERTLKATGLQEGTEYEFRVTAINKAGPGKPSDASKAAYARDPQYPPAPPA |
| | | FPKVYDTTRSSVSLSWGKPAYDGGSPIIGYLVEVKRADSDNWVRCNLPQNLQKTRFEVTG |
| | | LMEDTQYQFRVYAVNKIGYSDPSDVPDKHYPKDILIPPEGELDADLRKTLILRAGVTMRL |
| | | YVPVKGRPPPKKITWSKPNVNLRDRIGLDIKSTDFDTFLRCENVNKYDAGKYILTLENSCG |
| | | KKEYIIVVKVLDTPGPPVNVTVKEISKDSAYVTWEPPIIDGGSPIINYVVQKRDAERKSW |
| | | STVTTEECSSKTSFRVANLEEGKSYFRVFAENEYGIGDPGETRDAVKASQTPGPVVDLKVR |
| | | SVSKSSCSIGWKKPHSDGGSRIIGYVVDFLTEENKWQRVMKSLSLQYSAKDLTEGKEYTF |
| | | RVSAENENGEGTPSEITVVARDDVVAPDLDLKGLPDLCYLAKENSNFRLKIPIKGPAPS |
| | | VSWKKGEDPLATDTRVSVESSAVNTTLIVYDCQKSDAGKYTITLKNVAGTKEGTISIKVV |
| | | GKPGIPTGPIKFDEVTAEAMTLKWAPPKDDGGSEHNYILEKRDSVNNKWVTCASAVQKT |
| | | TFRVTRLHEGMEYTFRVSAENKYGVGEGLKSEPIVARHPFDVPDAPPPPNIVDVRHDSVS |
| | | LTWTDPKKTGGSPITGYLEPKERNSLLWKRANKTPIRMRDFKVTGLTEGLEYEFRVMAI |
| | | NLAGVGKPSLPSEPVVALDPIDPPGKPEVINITRNSVTLIWTEPKYDGGHKLTGYIVEKR |
| | | DLPSKSWMKANHVNVPECAFTVTDLVEGGKYEFRIRAKNTAGAISAPSESTETIICKDEY |
| | | EAPIIVLDPTIKDGLTIKAGDTIVLNAISILGKPLPKSSWSKAGKDIRPSDITQITSTPT |
| | | SSMLTIKYATRKDAGEYTITATNPFGTKVEHVKVTVLDVPGPPGPVEISNVSAEKATLTW |
| | | TPPLEDGGSPIKSYILEKRETSRLLWTVVSEDIQSCRHVATKLIQGNEYIFRVSAVNHYG |
| | | KGEPVQSEPVKMVDRFGPPGPPEKPEVSNVTKNTATVSWKRPVDDGGSEITGYHVERREK |
| | | KSLRWVRAIKTPVSDLRCKVTGLQEGSTYEFRVSAENRAGIGPPSEASDSVLMKDAAYPP |
| | | GPPSNPHVTDTTKKSASLAWGKPHYDGGLEITGYVVEHQKVGDEAWIKDTTGTALRITQF |
| | | VVPDLQTKEKYNFRISAINDAGVGEPAVIPDVEIVEREMAPDFELDAELRRTLVVRAGLS |
| | | IRIFVPIKGRPAPEVTWTKDNINLKNRANIENTESFTLLIIPECNRYDTGKFVMTIENPA |
| | | GKKSGFVNVRVLDTPGPVLNLRPTDITKDSVTLHWDLPLIDGGSRHNYIVEKREATRKS |
| | | YSTATIKCHKCTYKVTGLSEGCEYFFRVMAENEYGIGEPTETTEPVKASEAPSPPDSLNI |
| | | MDITKSTVSLAWPKPKHDGGSKITGYVIEAQRKGSDQWTHITTVKKGLECVVRNLTEGEEY |
| | | TPQVMAVNSAGRSAPRESRPVIVKEQTMLPELDLRGIYQKLVIAKAGDNIKVEIPVLGRP |
| | | KPTVTWKKGDQILKQTQRVNFETTATSTILNINECVRSDSGPYPLTARNIVGEVGDVITI |
| | | QVHDIPGPPTGPIKFDEVSSDFVTFSWDPPENDGGVPISNYVVEMRQTDSTTWVELATTV |
| | | IRTTYKATRLTTGLEYQFRVKAQNRYGVGPGITSACIVANYPFKVPGPPGTPQVTAVTKD |
| | | SMTISWHEPLSDGGSPILGYHVERKERNGILWQTVSKALVPGNIFKSSGLTDGIAYEFRV |
| | | IAENMAGKSKPSKPSEPMLALDPIDPPGKPVPLNITRHTVTLKWAKPEYTGGFKITSYIV |
| | | EKRDLPNGRWLKANFSNILENEFTVSGLTEDAAYEFRVIAKNAAGAISPPSEPSDAITCR |
| | | DDVEAPKIKVDVKFKDTVILKAGEAFRLEADVSGRPPPTMEWSKDGKELEGTAKLEIKIA |
| | | DFSTNLVNKDSTRRDSGAYTLTATNPGGFAKHIFNVKVLDRPGPPEGPLAVTEVTSEKCV |
| | | LSWFPPLDDGGAKIDHYIVQKRETSRLAWTNVASEVQVTKLKVTKLLKGNEYIFRVMAVN |
| | | KYGVGEPLESSEPVLAVNPYGPPDPPKNPEVTTITKDSMVVCWGHPDSDGGSEIINYIVER |
| | | RDKAGQRWIKCNKKTLTDLRYKVSGLTEGHEYEFRIMAENAAGISAPSPTSPFYKACDTV |
| | | FKPGPPGNPRVDTSRSSISIAWNKPIYDGGSEITGYMVEIALPEEDEWQIVTPPAGLKA |
| | | TSYTITGLTENQEYKIRIYAMNSEGLGEPALVPGTPKAEDRMLPPEIELDADLRKVVTIR |
| | | ACCTLRLFVPIKGPAPEVKWARDHGESLDKASIESTSSYTLLIVGNVNRFDSGKYILTV |
| | | ENSSGSKSAFVNVRVLDTPGPPQDLKVKEVTKTSVTLTWDPPLLDGGSKIKNYIVEKRES |
| | | TRKAYSTVATNCHKTSWKVDQLQEGCSYYFRVLAENEYGIGLPAETAESVKASERPLPPG |
| | | KITLMDVTRNSVSLSWEKPEHDGGSRILGYIVEMQTKGSDKWATCATVKVTEATITGLIQ |
| | | GEEYSFRVSAQNEKGISDPRQLSVPVIAKDLVIPPAPKLLFNTFTVLAGEDLKVDVPFIG |
| | | RPTPAVTWHKDNVPLKQTTRVNAESTENNSLLTIKDACREDVGHYVVKLTNSAGEAIETL |
| | | NVIVLDKPGPPTGPVKMDEVTADSITLSWGPPKYDGGSSINNYIVEKRDTSTTTWQIVSA |
| | | TVARTTIKACRLKTGCEYQFRIAAENRYGKSYLNSEPTVAQYPFKVPGPPGTPVVTLSS |
| | | RDSMEVQWNEPISDGGSRVIGYHLERKERNSILWVKLNKTPIPQTKFKTTGLEEGVEYEF |
| | | RVSAENIVGIGKPSKVSECYVARDPCDPPGRPEAIIVTRNSVTLQWKKPTYDGGSKITGY |
| | | IVEKKELPEGRWMKASFTNIIDTHFEVTGLVEDHRYEFRVIARNAAGVFSEPSESTGAIT |
| | | ARDEVDPPRISMDPKYKDTIVVHAGESFKVDADIYGKPIPTIQWIKGDQELSNTARLEIK |
| | | STDFATSLSVKDAVRVDSGNYILKAKNVAGERSVTVNVKVLDRPGPPEGPVVISGVTAEK |
| | | CTLAWKPPLQDGGSDIINYIVERRETSRLVWTVVDANVQILSCKVTKLLEGNEYTFRIMA |
| | | VNKYGVGEPLESEPVVAKNPFVVPDAPKAPEVTTVTKDSMIVVWERPASDGGSEILGYVL |
| | | EKRDKEGIRWTRCHKRLIGELRLRVTGLIENHDYEFRVSAENAAGLSEPSPPSAYQKACD |
| | | PIYKPGPPNNPKVIDITRSSVFLSWSKPIYDGGCEIQGYIVEKCDVSVGEWTMCTPPTGI |
| | | NKTNIEVEKLLEKHEYNFRICAINKAGVGEHADVPGPIIVEEKLEAPDIDLDLELRKIIN |
| | | IRAGGSLRLFVPIKGRPTPEVKWGKVDGEIRDAAIIDVTSSFTSLVLDNVNRYDSGKYTL |
| | | TLENSSGTKSAFVTVRVLDTPSPPVNLKVTEHKDSVSITWEPPLLDGGSKIKNYIVEKR |
| | | EATRKSYAAVVTNCHKNSWKIDQLQEGCSYYFRVTAENEYGIGLPAQTADPIKVAEVPQP |
| | | PGKITVDDVTRNSVSLSWTKPEHDGGSKIIQQYIVEMQAKHSEKWSECARVKSLQAVITNL |
| | | TQGEEYLFRVVAVNEKGRSDPRSLAVFIVAKDLVIEPDVKPAFSSYSVQVGQDLKIEVPI |
| | | SGRPKPTITWTKDGLPLKQTTRINVTDSLDLTTLSIKETHKDDGGQYGITVANVVGQKTA |
| | | SIEIVTLDKPDPPKGPVKFDDVSAESITLSWNPPLYTGGCQITNYTVQKRDTTTTVWDVV |
| | | SATVARTTLRVTKLRTGTEYQFRIFAENRYGQSFALESDPTVAQYPYREPGPPGTPFATA |
| | | ISKDSMVIQWHEPVNNGGSPVIGYHLERKERNSILWTKVNKTIIHDIQFKAQNLEEGIEY |
| | | EFRVYAENIVGVGKASKNSECYVARDPCDPPGTPEPIMVKRNEITLQWTKPVYDGGSMIT |
| | | GYIVEKRDLPDGRWMKASFTNVIETQFTVSGLTEDQRYEFRVIAKNAAGAISKPSDSTGP |
| | | ITAKDEVELPRISMDPKFRDTIVVNAGETFRLEADVHGKPLPTIEWLRGDKEIEESARCE |
| | | IKNTDFKALLIVKDAIRIDGGQYILRASNVAGSKSFPVNVKVLDRPGPPEGPVQVTGVTS |
| | | EKCSLTWSPPLQDGGSDISHYVVEKRETSRLAWTVVASEVVTNSLKVTKLLEGNEYVFRI |
| | | MAVNKYGVGEPLESAPVLMKNPFYLPGPPKSLEVTNIAKDSMTVCWNRPDSDGGSEHGY |
| | | IVEKRDRSGIRWIKCNKRRITDLRLRVTGLTEDHEYEFRVSAENAAGVGEPSPATVYYKA |
| | | CDPVFKPGPPTNAHIVDTTKNSITLAWGKPIYDGGSEILFYVVEICKADEEEWQIVTPQT |
| | | GLRVTRFEISKLTEHQEYKIRVCALNKVGLGEATSVPGTVKPEDKLEAPELDLDSELRKG |
| | | IVVRAGGSARIHIPFKGRPTPEITWSREEGEFTDKVQIEKGVNYTQLSIDNCDRNDAGKY |
| | | ILKLENSSGSKSAFVTVKVLDTPGPPQNLAVKEVRKDSAFLVWEPPIIDGGAKVKNYVID |
| | | KRESTRKAYANVSSKCSKTSFKVENLTEGAIYYFRVMAENEFGVGVPVETVDAVKAAEPP |
| | | SPPGKVTLTDVSQTSASLMWEKPEHDGGSRVLGYVVEMQPKGTEKWSIVAESKVCNAVVT |
| | | GLSSGQEYQFRVKAYNEKGKSDPRVLGVPVIAKDLTIQPSLKLPFNTYSIQAGEDLKIEI |
| | | PVIGRPRPNISWVKDGEPLKQTTRVNVEETATSTVLHIKEGNKDDFGKYTVTATNSAGTA |
| | | TENLSVIVLEKPGPPVGPVRFDEVSADFVVISWEPPAYTGGCQISNYIVEKRDTTTTTWH |
| | | MVSATVARTTIKITKLKTGTEYQFRIFAENRYGKSAPLDSKAVIVQYPFKEPGPPGTPFV |
| | | TS [symbol] KDQMLVQWHEPVNDGGTKIIGYHLEQKEKNSILWVKLNKTPIQTKFKTTGLDEGL |
| | | EYEFKVSAENIVGIGKPSKVSECFVARDPCDPPGRPEAIVITRNNVILKWKKPAYDGGSK |
| | | ITGYIVEKKDLPDGRWMKASFTNVLETEFTVSGLVEDQRYEFRVIARNAAGNFSEPSDSS |
| | | GAITARDEIDAPNASLDPKYKDVIVVHAGETFVLEADIRGKPIPDVVWSKDGKELEETAA |
| | | RMEIKSTIQKTTLVVKDCIRTDGGQYILKLSNVGGTKSIPITVKVLDRPGPPEGPLKVTG |
| | | VTAEKCYLAWNPPLQDGGANISHYIIEKRETSRLSWTQVSTEVQALNYKVTKLLPGNEYI |
| | | FRVMAVNKYGIGEPLESGPVTACNPYPPGPPSTPEVSAITKDSMVVTWARPVDDGGTEI |
| | | EGYILEKRDKEGVRWTKCNKKTLTDLRLRVTGLTEGHSYEFRVAAENAAGVGEPSEPSVF |
| | | YRACDALYPFGPPSNPKVTDTSRSSVSLAWSKPIYDGGAPVKGYVVEVKEAAADEWTTCT |
| | | PPTGLQGKQFTVIKLKENTEYNFRICAINSEGVGEPATLPGSVVAQERIEPPEIELDADL |
| | | RKVVVLRASATLRLFVIIKGRPEPEVKWEKAEGILTDRAQIEVTSSFTMLVIDNVTRFDS |
| | | GRYNLTLENNSGSKTAFVNVRVLDSPSAPVNLTIREVKKDSVTLSWEPPLIDGGAKITNY |
| | | IVEKRETTRKAYATITNNCTKTTFRIENLQEGCSYYFRVLASNEYGIGLPAETTEPVRVS |
| | | EPPLPPGRVTLVDVTRNTATIKWEKPESDGGSKITGYVVEMQTKGSEKWSTCTQVKTLEA |
| | | TISGLTAGEEYVFRVAAVNEKGRSDPRQLGVPVIARDIEIKPSVELPFHTFNVKAREQLK |
| | | IDVPFKGRPQATVNWRKDGQTLKETTRVNSSSKTVTSLSIKEASKEDVGTYELCVSNSA |
| | | GSITVPITIIVLDRPGPPGPIRIDEVSCDSITISWNPPEYDGGCQISNYIVEKKETTSTT |
| | | WHIVSQAVARTSIKIVRLTTGSEYQFRVCAENRYGKSSYSESSAVVAEYPFSPPGPPGTP |
| | | KVVHATKSTMLVTWQVPVNDGGSRVIGYHLEYKERSSILWSKANKILIADTQMKVSGLDE |
| | | GLMYEYRVYAENIAGIGKCSKSCEPVPARDPCDPPGQPEVTNITRKSVSLKWSKPHYDGG |
| | | AKITGYIVERRELPDGRWLKCNYTNIQETYPEVTELTEDQRYEPRVFARNAADSYSEPSE |
| | | STGPHVKDDVEPPRVMMDVKFRDVIVVKAGEVLKINADIAGRPLPVISWAKDGIEIEER |
| | | ARTEIISTDNHTLLTVKDCIRRDTGQYVLTLKNVAGTRSVAVNCKVLDKPGPPGPLEIN |
| | | GLTAEKCSLSSWGRPQEDGGADIDYYIVEKRETSHLAWTICEGELQMTSCKVTKLLKGNEY |
| | | IPRVTGVNKYGVGEPLESVAIKALDPFTVPSPPTSLEITSVTKESMTLCWSRPESDGGSE |
| | | ISGYIIERREKNSLRWVRVNKKPVYDLRVKSTGLREGCEYEYRVYAENAAGLSLPSETSP |
| | | LIRAEDPVFLPSPPSKPKIVDSGKTTTTIAWVKPLFDGGAPITGYTVEYKKSDDTDWKTS |
| | | IQSLRGTEYTISGLITGAEYVFRVKSVNKVGASDPSDSSDPQIAKEEEEEPLFDIDSEMR |
| | | KTLIVKAGASFTMTVPFRGRPVPNVLWSKPDTDLRTRAYVDYYDSRTSLTIENANRNDSG |
| | | KYTLTIQNVLSAASLTLVVKVLDTPGPPTNITVQDVTKESAVLSWDVPENDGGAPVKNYH |
| | | IEKREASKKAWVSVTNNCNRLSYKVTNLQEGAIYYFRVSGENEFGVGIPAETKEGVKITE |
| | | KPSPPEKLGVTSISKDSVSLTWLKPEHDGGSRIVHYVVEALEKGQKNWVKCAVAKSTHHV |
| | | VSGLRENSEYFFRVPAENQAGLSDPRELLLPVLIKEQLEPPEIDMKNPPSHTVYVRAGSN |
| | | LKVDIPISGKPLPKVILSRDGVPLKATMRFNTEIAENLTINLKESVTADAGRYEITAAN |
| | | SSGTTKAFINIVVLDRPGPPTGPVVISDITEESVTLKWEPPKYDGGSQVTNYILLKRETS |
| | | TAVWTEVSATVARTMMKVMKLTTGEEYQFRIKAENRFGISDHIDSACVTVKLPYTTPGPP |
| | | STPWVTNVTRESITVGWHEPVSNGGSAVVGYHLEMKDRNSILWQKANKLVIRTTHFKVIT |
| | | ISAGLIYEFRVYAENAAGVGKPSHPSEPVLAIDACEPPRNVRITDISKNSVSLSWQQPAF |
| | | DGGSKITGYIVERRDLPDGRWTKASFTNVTETQFIISGLTQNSQYEFRVFARNAVGSISN |
| | | PSEVVGPITCIDSYGGPVIDLPLEYTEVVKYRAGTSVKLRAGISGKPAPTIEWYKDDKEL |
| | | QTNALVCVENTTDLASILIKDADRLNSGCYELKLRNAMGSASATIRVQILDKPGPPGGPI |
| | | EFKTVTAEKITLLWRPPADDGGAKITHYIVEKRETSRVVWSMVSEHLEECIITTTKIIKG |
| | | NEYIFRVRAVNKYGIGEPLESDSVVAKNAFVTPGPPGIPEVTKITKNSMTVVWSRPIADG |
| | | GSDISGYFLEKRDKKSLGWFKVLKETIRDTRQKVTGLTENSDYQYRVCAVNAAGQGPFSE |
| | | PSEFYKAADPIDPPGPPAKIRIADSTKSSITLGWSKPVYDGGSAVTGYVVEIRQGEEEEW |
| | | TTVSTKGEVRTTEYVVSNLKPGVNYYFRVSAVNCAGQGEPIEMNEPVQAKDILEAPEIDL |
| | | DVALRTSVIAKAGEDVQVLIPFKGRPPPTVTWRKDEKNLGSDARYSIENTDSSSLLTIPQ |
| | | VTRNDTGKYILTIENGVGEPKSSTVSVKVLDTPAACQKLQVKHVSRGTVTLLWDPPLIDG |
| | | GSPIINYVIEKRDATKRTWSVVSHKCSSTSFKLIDLSEKTPFFFRVLAENEIGIGEPCET |
| | | TEPVKAAEVPAPIRDLSMKDSTKTSVILSWTKPDFDGGSVITEYVVERKGKGEQTWSHAG |
| | | ISKTCEIEVSQLKEQSVLEFRVFAKNEKGLSDPVTIGPITVKEIITPEVDLSDIPGAQV |
| | | TVRIGHNVHLELPYKGKPKPSISWLKDGLPLKESEFVRFSKTENKITLSIKNAKKEHGGK |
| | | YTVILDNAVCRIAVPITVITLGPPSKPKGPIRFDEIKADSVILSWDVPEDNGGGEITCYS |
| | | IEKRETSQTNWKMVCSSVARTIFKVPNLVKDAEYQFRVRAENRYGVSQPLVSSIIVAKHQ |
| | | FRIPGPPGKPVIYNVISDGMSLTWDAPVYDGGSEVTGFHVEKKERNSILWQKVNTSPISG |
| | | REYRATGLVEGLDYQFRVYAENSAGLSSPSDPSKFTLAVSPVDPPGTPDYIDVTRETITL |
| | | KWNPPLRDGGSKIVGYSIEKRQGNERWVRCNFTDVSECQYTVTGLSPGDRYEFRIIARNA |
| | | VGTISPPSQSSGIIMTRDENVPPIVEPGPEYPDGLIIKSGESLRIKALVQGRPVPRVTWF |
| | | KDGVEIEKRMNMEITDVLGSTSLFVRDATRDHRGVYTVEAKNASGSAKAEIKVKVQDTPG |
| | | KVVGPIRFTNITGEKMTLWWDAPLNDGCAPITHYIIEKRETSRLAWALIEDKCEAQSYTA |
| | | IKLINGNEYQFRVSAVNKPGVGRPLDSDPVVAQIQYTVPDAPGIPEPSNITGNSITLTWA |
| | | RPESDGGSEIQQYILERREKKSTRWVKVISKRPISETRFKVTGLTEGNEYEFHVMAENAA |
| | | GVGPASGISRLIKCREPVNPPGPPTVVKVTDTSKTTVSLEWSKPVFDGGMEIIGYIIEMC |
| | | KADLGDWHKVNAEACVKTRYTVTDLQAGEEYKFRVSAINGAGKGDSCEVTGTIKAVDRLT |
| | | APELDIDANPKQTHAVVRAGASIRLPIAYQGRPTPTAVWSKPDSNLSLRADIHTTDSPSTL |
| | | TVENCNRNDAGKYTLTVENNSGSKSITFTVKVLDTPGPPGPITFKDVTRGSATLMWDAPL |
| | | LDGGARIHHYVVEKREASRRSWQVISEKCTRQIFKVNDLAEGVPYYFRVSAVNEYGVGEP |
| | | YEMPEPIVATEQPAPPRRLDVVDTSKSSAVLAWLKPDHDGGSRITGYLLEMRQKGSDFWV |
| | | EAGHTKQLTFTVERLVEKTEYEFRVKAKNDAGYSEPREAFSSVIIKEPQIEPTADLTGIT |
| | | NQLITCKAGSPFTIDVPISGRPAPKVTWKLEEMRLKETDRVSITTTKDRTTLTVKDSMRG |
| | | DSGRYFLTLENTAGVKTPSVTVVVIGRPGPVTGPIEVSSVSAESCVLSWGEPKDGGGTEI |
| | | TNYIVEKRESGTTAWQLVNSSVKRTQIKVTHLTKYMEYSFRVSSENRFGVSKPLESAPII |
| | | AEHPFVPPSAPTRPEVYHVSANAMSIRWEEPYHDGGSKIIGYWVEKKERNTILWVKENKV |
| | | PCLECNYKVTGLVEGLEYQFRTYALNAAGVSKASEASRPIMAQNPVDAPGRPEVTDVTRS |
| | | TVSLIWSAPAYDGGSKVVGYIIERKPVSEVGDGRWLKCNYTIVSDNFFTVTALSEGDTYE |
| | | FRVLAKNAAGVISKGSESTGPVTCRDEYAPPKAELDARLHGDLVTIRAGSDLVLDAAVGG |
| | | KPEPKIIWTKGDKELDLCEKVSLQYTGKRATAVIKFCDRSDSGKYTLTVKNASGTKAVSV |
| | | MVKVLDSPGPCGKLTVSRVTQEKCTLAWSLPQEDGGAEITHYIVERRETSRLNWVIVEGE |
| | | CPTLSYVVTRLIKNNEYIFRVRAVNKYGPGVPVESEPIVARNSFTIPSPPGIPEEVGTGK |
| | | EHHIQWTKPESDGGNEISNYLVDKREKKSLRWTRVNKDYVVYDTRLKVTSLMEGCDYQF |
| | | RVTAVNAAGNSEPSEASNFISCREPSYTPGPPSAPRVVDITKHSISLAWTKPMYDGGTDI |
| | | VGYVLEMQEKDTDQWYRVHTNATIRNTEFTVPDLKMGQKYSFRVAAVNVKGMSEYSESIA |
| | | EIEPVERIEIPDLELADDLKKTVTIRAGASLRLMVSVSGRPPPVITWSKQGIDLASRAII |
| | | DTTESYSLLIVDKVNRYDAGKYTIEAENQSGKKSATVLVKVYDTPGPCPSVKVKEVSRDS |
| | | VTHWEIPTIDGGAPVNNYIVEKREAAMRAFRTVTTKCSKTLYRISGLVEGTMYYFRVLP |
| | | ENIYGIGEPCETSDAVLVSEVPLVPAKLEVVDVTKSTVTLAWEKPLYDGGSRLTGYYLEA |
| | | CKAGTERWMKVVTLKPTVLEHTVTSLNEGEQYLFRIRAQNEKGVSEPRETVTAVTVQDLR |
| | | VLPTIDLSTMPQKTIHVPAGRPVELVIPIAGRPPPAASWFFAGSKLRESERVTVETHTKV |
| | | AKLTIRETTIRDTGEYTLELKNVTGTTSETIKVIILDKPGPPTGPIKIDEIDATSITISW |
| | | EPPELDGGAPLSGYVVEQRDAHRPGWLPVSESVTRSTFKFTRLTEGNEYVFRVAATNRFG |
| | | IGSYLQSEVIECRSSIRIPGPPETLQIFDVSRDGMTLTWYPPEDDGGSQVTGYIVERKEV |
| | | RADRWVRVNKVPVTMTRYRSTGLTEGLEYEHRVTAINARGSGKPSRPSKPIVAMDPIAPP |
| | | GKPQNPRVTDTTRTSVSLAWSVPEDEGGSKVTGYLIEMQKVDQHEWTKCNTTPTKIREYT |
| | | LTHLPQGAEYRFRVLACNAGGPGEPAEVPGTVKVTEMLEYPDYELDERYQEGIFVRQGGV |
| | | IRLTIPIKGKPFPICKWTKEGQDISKRAMIATSETHTELVIKEADRGDSGTYDLVLENKC |
| | | GKKAVYIKVRVIGSPNSPEGPLEYDDIQVRSVRVSWRPPADDGGADILGYILERREVPKA |
| | | AWYTIDSRVRGTSLVVKGLKENVEYHFRVSAENQRGISKPLKSEEPVTPKTPLNPPEPPS |
| | | NPPEVLDVTKSSVSLSWSRPKDDGGSRVTGYYIERKETSTDKWVRHNKTQITTTMYTVTG |
| | | LVPDAEYQFRIIAQNDVGLSETSPASEPVVCKDPFDKPSQPGELEILSISKDSVTLQWEK |
| | | PECDGGEILGYWVEYRQSGDSAWKKSNKERIKDKQFTIGGLLEATEYEFRVFAENETGL |
| | | SRPRRTAMSIKTKLTSGEAPGIRKEMKDVTTKLGEAAQLSCQIVGRPLPDIKWYRFGKEL |
| | | IQSRKYKMSSDGRTHTLTVMTEEQEDEGVYTCLATNEVGEVTSSKLLLQAATPQFHPGYP |
| | | LKEKYYGAVGSTLRLHVMYIGRPVPAMTWPHGQKLLQNSENITIENTEHYTHLVMKNVQR |
| | | KTHAGKYKVQLSNVFGTVDAILDVEIQDKPDKPTGPIVIEALLKNSAVISWKPPADDGGS |
| | | WITNYVVEKCEAKEGAEWQLVSSAISVTTCRIVNLTENAGYYFRVSAQNTFGISDPLEVS |
| | | SVVIIKSPFEKPGAPGKPITTAVTKDSCVVAWKPPASDGGAKIRNYYLEKREKKQNKWIS |
| | | VTTEEIRETVFSVKNLIEGLEYEFRVKCENLGGESEWSEISEPITPKSDVPIQAPHFKEE |
| | | LRNLNVRYQSNATLVCKVTGHPKPTVKWYRQGKEHADGLKYRIQEPKGGYHQLIIASVT |
| | | DDDATVYQVRATNQGGSVSGTASLEVEVPAKIHLPKTLEGMGAVHALRGEVVSIKIPFSG |
| | | KPDPVITWQRGQDLIDNNGHYQVIVTRSFTSLVFPNGVERKDAGFYVVCAKNRFGIDQKT |
| | | VELDVADVPDPPRGVKVSDVSRDSVNLTWTEPASDGGSKITNYIVEKCATTAERWLRVGQ |
| | | ARETRYTVINLPGKTSYQFRVIAENKFGLSKPSEPSEPTTTKEDKTRAMNYDEEVDETRE |
| | | VSMTKASHSSTKELYEKYMIAEDLGRGEFGIVHRCVETSSKKTYMAKFVKVKGTDQVLVK |
| | | KEISILNIARHRNILHLHESPESMEELVMIFEFISGLDIFERINTSAFELNEREIVSYVH |
| | | QVCEALQFLHSHNIGHFDIRPENITYQTRRSSTTKIIEFGQRQLKPGDNFRLLFTAPEY |
| | | YAPEVHQHDVVSTATDMWSLGTLVYVLLSGINPPLAETNQQHENIMNAEYTFDEEAPKE |
| | | ISIEAMDFVDRLLVKERKSRMTASEALQHPWLKQKIERVSIKVIRTLKHRRYYHTLIKKD |
| | | LNMVVSAARISCGGAIRSQKGVSVAKVKVASIEIGPVSGQIMHAVGEEGGHVKYVCKIEN |
| | | YDQSTQVTWYFGVRQLENSEKYEITYEDGVAILYVKDITKLDDGTYRCVVNDYGEDSSY |
| | | AELFVKGVREVYDYYCRRTMKKIKRRTDTMRLLERPPEPTLPLYNKTAYVGENVRFGVTI |
| | | TVHPEPHVTWYKSGQIKIPGDNDKKYTFESDKGLYQLTINSVTTDDDAEYTVVARNKYGE |
| | | DSCKAKLTVTLHPPPTDSTLRPMFKRILANAECQEGQSVCPEIRVSGIPPPTLKWEKDGQ |
| | | PLSLGPNIEIIHEGLDYYALHIRDTLPEDTGYYRVTATNTAGSTSCQAHLQVERLRYKKQ |
| | | EFKSKEEHERHVQKQIDKTLRMAEILSGTESVPLTQVAKEALREAAVLYKPAVSTKTVKG |
| | | EFRLEIEEKKEERKLRMPYDVPEPRKYKQTTIEEDQRIKQFVPMSDMKWYKKIRDQYEMP |
| | | GKLDRVVQKRPKRIRLSRWEQFYYMPLPRITDQYRPKWRIPKLSQDDLEIVRPARRRTPS |
| | | PDYDFYYRPRRRSLGDISDEELLPIDDYLAMKRTEEERLRLEEELELGFSASPPSRSPP |
| | | HFELSSLRYSSPQAHVKVEETRKDFRYSTYHIPTKAEASTSYAELRERHAQAAYRQPKQR |
| | | QRIMAEREDEELLRPVTTTQHLSEYKSELDFMSKEEKSRKKSRRQREVTEITEIEEEYEI |
| | | SKHAQRESSSSASRLLRRRRSLSPTYIELMRPVSELIRSRPQPAEEYEDDTEITEIEEEYEI |
| | | SKHAQRESSSSASRLLRRRRSLSPTYIELMRPVSELIRSRPQPAEEYEDDTERRSPTPER |
| | | TRPRSPSPVSSERSLSRFERSARFDIFSRYESMKAALKTQKTSERKYEVLSQQPFTLDHA |
| | | PRITLRMRSHRVPCGQNTRFILNVQSKPTAEVKWYHNGVELQESSKIHYTNTSGVLTLEI |
| | | LDCHTDDSGTYRAVCTNYKGEASDYATLDVTGGDYTTYASQRRDEEVPRSVPPELTRTEA |
| | | YAVSSFKKTSEMEASSSVREVKSQMTETRESLSSYEHSASAEMKSAALEEKSLEEKSTTR |
| | | KIKTTLAARILTKPRSMTVYEGESARFSCDTDGEPVPTVTWLRKGQVLSTSARHQVTTTK |
| | | YKSTFEISSVQASDEGNYSVVVENSEGRQEAEFILTIQKARVTEKAVTSPPRVKSPEPRV |
| | | KSPEAVKSPKRVKSPEPSHPKAVSPTETKPTPTEKVQHLPVSAPPKITQFLKAEASKEIA |
| | | KLTCVVESSVLRAKEVTWYKDGKKLKENGHFQFHYSADGTYELKINNLTESDQGEYVCEI |
| | | SGEGGTSKTNLQPMGQAFKSIHEKVSKISETKKSDQKTTESTVTRKTEPKAPEPISSKPV |
| | | IVTGLQDTTVSSDSVAKFAVKATGEPRPTAIWTKDGKAITQGGKYKISEDKGGFFLEIHK |
| | | TDTSDSGLYTCTVKNSAGSVSSSCKLTIKAIKDTEAQKVSTQKTSEITPQKKAVVQEEIS |
| | | QKALRSEEIKMSEAKSQEKLALKEEASKVLISEEVKKSAATSLEKSIVHEEITKTSQASE |
| | | EVRTHAEIKAFSTQMSINEGQRLVLKANIAGATDVKWVLNGVELTNSEEYRYGVSGDQT |
| | | LTIKQASHRDEGILTCISKTKEGIVKCQYDLTLSKELSDAPAFISQPRSQNINEGQNVNF |
| | | TCEISGEPSPEIEWPKNNLPISISSNVSISRSRNVYSLEIRNASVSDSGKYTIKAKNFRG |
| | | QCSATASLMVLPLVEEPSREVVLRTSGDTSLQGSFSSQSVQMSASKQEASFSSFSSSSAS |
| | | SMTEMKFASMSAQSMSSMQESFVEMSSSSFMGISNMTQLESSTSKMLKAGIRGIPPKIEA |
| | | LPSDISIDEGKVLTVACAFTGEPTPEVTWSCGGRKIHSQEQGRPHIENTDDLTTLIIMDV |
| | | QKQDGGLYTLSLGNEPGSDSATVNIHIRSI |
| 37 | CAP-Gly domain-containing | MSMLKPSGLKAPTKILKPGSTALKTPTAVVAPVEKTISSEKASSTPSSETQEEFVDDFRV |
| | linker protein 1 (CLIP1) | GERVWVNGNKPGFIQFLGETQPAPGQWAGIVLDEPIGKNDGSVAGVRYPQCEPLKGIFTR |
| | | PSKLTRKVQAEDEANGLQTTPASRATSPLCTSTASMVSSSPSTPSNIPQKPQPAAKEPS |
| | | ATPPISNLTKTASESISNLSEAGSIKKGERELKIGDRVLVGGTKAGVVRFLGETDFAKGE |
| | | WCGVELDEPLGKNDGAVAGTRYFQCQPKYGLPAPVHKVTKIGFPSTTPAKAKANAVRRVM |
| | | ATTSASLKRSPSASSLSSMSSVASSVSSRPSRTGLLTETSSRYARKISGTTALQEALKEK |
| | | QQHIEQLLAERDLERAEVAKATSHVGEIEQELALARDGHDQHVLELEAKMDQLRTMVEAA |
| | | DREKVELLNQLEEEKRKVEDLQFRVEEESITKGDLEQKSQISEDPENTQKLEHARIKEL |
| | | EQSLLFEKTKADKLQRELEDTRVATVSEKSRIMELKEDLALRVQEVAELRRRLESNKPAG |
| | | DVDMSLSLLQEISSLQEKLEVTRTDHQRETTSLKEHFGAREETHQKEIKALYTATEKLSK |
| | | ENESLKSKLEHANKENSDVIALWKSKLETAIASHQQAMEELKVSPSKGLGTETAEFAELK |
| | | TQIEKMRLDYQHEIENLQNQQDSERAAHAKEMEALRAKLMKVIKEKENSLEAIRSKLDKA |
| | | EDQHLVEMEDTLNKLQEAEIKVKELEVLQAKCNEQTKVIDNFTSQLKATEELLDLDALR |
| | | KASSEGKSEMKKLRQQLEAAEKQIKHLEIEKNAESSKASSITRELQGRELKLTNQENLS |
| | | EVSQVKETLEKELQILKEKFAEASEEAVSVQRSMQETVNKLHQKEEQFNMLSSDLEKLRE |
| | | NLADMEAKPREKDEREEQLIKAKEKLENDIAEIMKMSGDNSSSQLTKMNDELRLKERDVEE |
| | | LQLKLTKANENASFLQKSIEDMTVKAEQSQQEAAKKHEEEKKELERKLSDLEKKMETSHN |
| | | QCQELKARYERATSETKTRHEEILQNLQKTLLDTEDKLKGAREENSGLLQELEELRKQAD |
| | | KAKAAQTAEDAMQIMEQMTKEKTETLASLEDTKQTNAKLQNELDTLKENNLKNVEELNKS |
| | | KELLTVENQKMEEFRKEIETLKQAAAQKSQQLSALQEENVKLAEELGRSRDEVTSHQKLE |
| | | EERSVLNNQLLEMKKRESKFIKDADEEKASLQKSISITSALLTEKDAELEKLRNEVTVLR |
| | | GENASAKSLHSVVQTLESDKVKLELKVKNLEQLKENKRQLSSSSGNTDTQADEDERAQE |
| | | SQIDFLNSVIVDLQRKNQDLKMKVEMMEAALNGNGDDLNNYDSDDQEKQSKKKPRFCD |
| | | ICDCFDLHDTEDCPTQAQMSEDPPHSTHHGSRGEERPYCEICEMFGHWATNCNDDETF |
| 38 | Mitotic checkpoint | MAAVKKEGGALSEAMSLEGDEWELSKENVQPLRQGRIMSTLQGALAQESACNNTLQQQKR |
| | serine/threonine-protein | AFEYEIRFYTGNDPLDVWDRYISWTEQNYPQGGKESNMSTLLERAVEALQGERYYSDPR |
| | kinase BUB1 beta (BUB1B) | FLNLWLKLGRLCNEPLDMYSYLHNQGIGVSLAQFYISWAEEYEARENFRKADAIFQEGIQ |
| | | QKAEPLERLQSQHRQFQARVSRQTLLALEKEEEEEVFESSVPQRSTLAELKSKGKKTARA |
| | | PIIRVGGALKAPSQNRGLQNPFPQQMQNNSRITVFDENADEASTAELSKPTVQPWIAPPM |
| | | PRAKENELQAGPWNTGRSLEHRPRGNTASLIAVPAVLPSPTPYVEETARQPVMTPCKIEP |
| | | SINHILSTRKPGKEEGDPLQRVQSHQQASEEKKEKMMYCKEKIYAGYGEFSFEEIRAEVF |
| | | RKKLKEQREAELLTSAEKRAEMQKQIEEMEKKLKEIQTTQQERTGDQQEETMPTKETTKL |
| | | QIASESQKIPGMTLSSSVCQVNCCARETSLAENTWQEQPHSKGPSVPFSIFDEFLLSEKK |
| | | NKSPPADPPRVLQRRPLAVLKTSESITSNEDVSPDVCDEFTGIEPLSEDAITGFRNVT |
| | | ICPNPEDTCDPARAARFVSTPFHEIMESLKDLPSDPERLLPEEDLDVKTSEDQQTACGTIY |
| | | SQTLSIKKLSPIIEDSREATHSSGFGSSASVASTSSIKCLQIPEKLELTNETSENPQS |
| | | PWCSQYRRQLLKSLPELSASAELCIEDRPMPKLEIEKEIELGNEDYCIKRYLICEDYKL |
| | | FWVAPRNSAELTVIKVSSQPVPWDFYINLKLKERLNEDFDHFCSYQYQDGCTVWHQYIN |
| | | CFTLQDLLQHSEYITHEITVLIIYNLLTIVEMLHKAEIVHGDLSPRCLILRNRIHDPYDC |
| | | NKNNQALKIVDFSYSVDLRVQLDVFTLSGFRTVQILEGQKILANCSSPYQVDLPGIADLA |
| | | HLLLFKEHLQVFWDGSFWKLSQNISELKDGELWNKFFVRILNANDEATVSVLGELAAEMN |
| | | GVFDTIFQSHLNKALWKVGKLTSPGALLFQ |
| 39 | Rho guanine nucleotide | MEDFARGAASPGPSRPGLVPVSHGAEDEDFENELETNSEEQNSQFQSLEQVKRRPAHLM |
| | exchange factor 1 | ALLQHVALQFEPGPLLCCLHADMLGSLGPKEAKKAFLDFYHSFLEKTAVLRVPVPPNVAF |
| | (ARHGEF1) | ELDRTRADLISEDVQRRFVQEVVQSQQVAVGRQLEDFRSKRLMGMTPWEQELAQLEAWVG |
| | | RDRASYEARERHVAERLLMHLEEMQHTISTDEEKSAAVVNAIGLYMRHLGVRTKSGDKKS |
| | | GRNFFRKKVMGNRRSDEPAKTKKGLSSILDAARWNRGEPQVPDFRHLKAEVDAEKPGATD |
| | | RKGGVGMPSRDRNIGAPGQDTPGVSLHPLSLDSPDREPGADAPLELGDSSPQGPMSLESI |
| | | APPESTDEGAETESPEPGDEGEPGRSGLELEPEEPPGWRELVPPDTLHSLPKSQVKRQEV |
| | | ISELLVTEAAHVRMLRVLHDLFFQPMAECLFFPLEELQNIFPSLDELIEVHSLFLDRLMK |
| | | RRQESGYLIEEIGDVLLARFDGAEGSWFQKISSRFCSRQSFALEQLKAKQRKDPRFCAFV |
| | | QEAESRPRCRRLQLKDMIPTEMQRLTKYPLLLQSIGQNTEEPTEREKVELAAECCREILH |
| | | HVNQAVRDMEDLLRLKDYQRRLDLSHLRQSSDPMLSEFKNLDITKKKLVHEGPLTWRVTK |
| | | DKAVEVHVLLLDDLLLLLQRQDERLLLKSHSRTLTPTPDGKTMLRPVLRLTSAMTREVAT |
| | | DHKAFYVLFTWDQEAQIYELVAQTVSERKNWCALITETAGSLKVPAPASRPKPRPSPSST |
| | | REPLLSSSENGNGGRETSPADARTERILSDLLPFCRPGPEGQLAATALRKVLSLKQLLFP |
| | | AEEDNGAGPFRDGDGVPGGGPLSPARTQEIQENLLSLEETMKQLEELEEEPCRLRPLLSQ |
| | | LGGNSVPQPGCT |
| 40 | Titin (TTN) | MTTQAPTFTQPLQSVVVLEGSTATFEAHISGFPVPEVSWFRDGQVISTSTLPGVQISFSD |
| | | GRAKLTIPAVTKANSGRYSLKATNGSGQATSTAELLVKAETAPPNFVQRLQSMTVRQGSQ |
| | | VRLQVRVTGIPTPVVKPYRDGAEIQSSLDFQISQEGDLYSLLIAEAYPEDSGTYSVNATN |
| | | SVGRATSTAELLVQGEEEVPAKKTKTIVSTAQISESRQTRIEKKIEAHPDARSIATVEMV |
| | | IDGAAGQQLPHKTPHRIPPKPKSRSPTPPSIAAKAQLARQQSPSPIRHSPSPVRHVRAPT |
| | | PSPVRSVSPAARISTSPIRSVRSFLLMRKTQASTVATGPEVPPPWKQEGYVASSSEAEMR |
| | | ETTLTTSTQIRTEERWEGRYGVQEQVTISGAAGAAASVSASASYAAEAVATGAKEVKQDA |
| | | DKSAAVATVVAAVDMARVREPVISAVEQTAQRTTTTAVHIQPAQEQVRKEAEKTAVTKVV |
| | | VAADKAKEQELKSRTKEVITTKQEQMHVTHEQIRKETEKTFVPKVVISAAKAKEQETRIS |
| | | EEITKKQKQVTQEAIRQETEITAASMVVVATAKSTKLETVPGAQEETTTQQDQMHLSYEK |
| | | IMKETRKTVVPKVIVATPKVKEQDLVSRGREGHTKREQVQITQEKMRKEAEKTALSTIA |
| | | VATAKAKEQETILRTRETMATRQEQIQVTHGKVDVGKKAEAVATVVAAVDQARVREPREP |
| | | GHLEESYAQQTTLEYGYKERISAAKVAEPPQRPASEPHVVPKAVKPRVIQAPSETHIKTT |
| | | DQKGMHISSQIKKTTDLTTERLVHVDKRPRTASPHFTVSKISVPKTEHGYEASIAGSAIA |
| | | TLQKELSATSSAQKTTKSVKAPTVKPSETRVRAEPTPLPQFPFADTPDTYKSEAGVEVKK |
| | | EVGVSITGTTVREERFEVLHGREAKVTETARVPAPVEIPVTPPTLVSGLKNVTVIEGESV |
| | | TLECHISGYPSPTVTWYREDYQIESSIDFQITFQSGIARLMIREAFAEDSGRFTCSAVNE |
| | | AGTVSTSCYLAVQVSEEFEKETTAVTEKFTTEEKRFVESRDVVMTDTSLTEEQAGPGEPA |
| | | AFYFITKPVVQKLVEGGSVVFGCQVGGNPKPHVYWKKSGVPLTTGYRTKVSYNKQTGECK |
| | | LVISMTFADDAGEYTIVVRNKHGETSASASLLEEADYELLMKSQQEMLYQTQVTAFVQEP |
| | | KVGETAPGFVYSEYEKEYEKEQALIRKKMAKDTVVVRTYVEDQEFHISSFEERLIKEIEY |
| | | RHKTTLEELLEEDGEEKMAVDISESEAVESGFDLRIKNYRILEGMGVTFHCKMSGYPLP |
| | | KIAWYKDGKRIKHGERYQMDFLQDGRASLRIPVVLPEDEGIYTAFASNIKGNAICSGKLY |
| | | VEPAAPLGAPTYIPTLEPVSRIRSLSPRSVSRSPIRMSPARMSPARMSPARMSPARMSPG |
| | | RRLEETDESQLERLYKPVFVLKPVSFKCLEGQTARFDLKVVGRPMPETPWFHDGQQIVND |
| | | YTHKVVIKEDGTQSLHVPATPSDSGEWTVVAQNRAGRSSISVILTVEAVEHQVKPMFVE |
| | | KLKNVNIKEGSQLEMKVRATGNPNPDIVWLKNSDHVPHKYPKIRIEGTKGEAALKIDST |
| | | VSQDSAWYTATAINKAGRDTTRCKVNVEVEFAEPEPERKLHPRGTYRAKEIAAPELEPL |
| | | HLRYGQEQWEEGDLYDKEKQQKPFFKKKLTSLRLKRFGPAHFECRLTPIGDPTMVVEWLH |
| | | DGKPLEAANRLRMINEFGYCSLDYGVAYSRDSGHTCRATNKYGTDHTSATLIVKDEKSL |
| | | VEESQLPEGRKGLQRIEELERMAHEGALTGVTTDQKEKQKPDIVLYPEPVRVLEGETARF |
| | | RCRVTGYPQPKVNWYLNGQLIRKSKRFRVRYDGIHYLDIVDCKSYDTGEVKTAENPEGV |
| | | IEHKVKLEIQQREDFRSVLRRAPEPRPEPHVHEPGKLLQFEVQKVDRPVDTTETKEVVKLK |
| | | RAERITHEKVPEESEELRSKFKRRTEEGYYEAITAVELKSRKKDESYEELLRKTKDELLH |
| | | WTKELTEEEKKALAEEGKITIPTFKPDKIELSPSMEAPKIFERIQSQTVGQGSDAHFRVR |
| | | VVGKPDECEWYKNGVKIERSDRIYWYWPEDNVCELVIRDVTAEDSASIMVKAINIAGET |
| | | SSHAFLLVQAKQLHFTQELQDVVAKEKDTMATFECETSEPFVKVKWYKDGMEVHEGDKY |
| | | RMHSDRKVHFLSILTIDTSDAEDYSCVLVEDENVKTTAKLIVEGAVVEPVKELQDIEVPE |
| | | SYSGELECIVSPENIEGKWYHNDVELKSNGKYTHSRRGRQNLTVKDVTKEDQGEYSFVI |
| | | DGKKTTCKLKMKPRPIAILQGLSDQKVCEGDIVQLLEVKVSLESVEGVWMKDGQEVQPSDR |
| | | VHIVIDKQSHMLLIEDMTKEDAGNYSFTIPALGLSTSGRVSVYSVDVITPLKDVNVIEGT |
| | | KAVLECKVSVPDVTSVKWYLNDEQIKPDDRVQAIVKGTKQRLVINRTHASDEGPYKLIVG |
| | | RVETNCNLSVEKIKHRGLRDLTCTETQNVVFEVELSHSGIDVLWNFKDKEIKPSSKYKI |
| | | EAHGKIYKLTVLNMMKDDEGKYTFYAGENITSGKLTVAGGAISKPLTDQTVAESQEAVFE |
| | | CEVANPDSKGEWLRDGKHLPLTNNIRSESDGHKRRLHAATKLDDIGEYTYKVATSKTSA |
| | | KLKVEAVKIKKTLKNLTVTETQDAVFTVELTHPNVKGVQWIKNGVVLESNEKYAISVKGT |
| | | IYSLRIKNCAIVDESVYGFRLGRLGASARLHVETVKHKKPKDVTALENATVAFEVSVSH |
| | | DTVPVKWFHKNVEIKPSDKHRLVSERKVHKLMLQNISPSDAGEYTAVVGQLECKAKLFVE |
| | | TLHITKTMKNIEVPETKTASFECEVSHFNVPSMWLKNGVEIEMSEKFKIVVQGKLHQLH |
| | | MNTSTEDSAEYTFVCGNDQVSATLTVTPIMITSMLKDINAEEKDHTFEVTVNYEGISYK |
| | | WLKNGVEIKSTDKCQMRTKKLTHSLNIRNVHFGDAADYTFVAGKATSTATLYVEARHIEF |
| | | RKHIKDIKVLEKKRAMFECEVSEPDITVQWMKDDQELQITDRIKIQKEKYVHRLLIPSTR |
| | | MSDAGKYTVVAGGNVSTAKLFVEGRDVRIRSIKKEKVQVIEKQRAVVEFEVNEDDYDAHWY |
| | | KDGIEINFQVQERHKYVVERRIHRMFISETRQSDAGEYTFVAGRNRSSVTLYVNAPEPPQ |
| | | VLQELQPVTVQSGKPARPCAVISGRFQPKISWYKEEQLLSTGPKCKFLHDGQEYTLLLIE |
| | | AFPEDAAVYTCEAKNDYGVATTSASLSVEVPEVVSPDQEMPVYPPAHTPLQDTVTSEGQ |
| | | PARFQCRVSGTDLKVSWYSKDKKIKPSRFFRMTQFEDTYQLEIAEAYPEDEGTYTFVASN |
| | | AVGQVSSTANLSLEAPESILHERIEQEIEMEMKEFSSSFLSAEEEGLHSAELQLSKINET |
| | | LELLSESPVYSTKFDSEKEGTGPIFIKEVSNADISMGDVATLSVTVIGIPKPKIQWFFNG |
| | | VLLTPSADYKFVFDGDDHSLHLFTKLEDEGEYTCMASNDYGKTICSAYLKINSKGEGHK |
| | | DTETESAVAKSLEKLGGPCPPHFLKELKPIRCAQGLPAIFEYTVVGEPAPTVTWFKENKQ |
| | | LCTSVYYTHHNPNGSGTPIVNDPQREDSGLYICKAENMLGESTCAAELLVLLETDMTD |
| | | TPCKAKSTPEAPEDFQPQTPLKGPAVEALDSEQEIATFVKDTTLKAALITEENQQLSYEHI |
| | | AKANELSSQLPLGAQELQSILEQDKLTPESTREFLCINGSIHFQPLKEPSPNLQLQIVQS |
| | | QKTFSKEGILMPEEPETQAVISDTEKIFPSAMSIEQINSLTVEPIKTLLEAEGNYPQSS |
| | | IEPPMHSYLTSVAEEVLSPKEKTVSDTNREQRVTLQKQEAQSALILSQSLAEGHVESLQS |
| | | PDVMISQVNYEPLVPSEHSCTEGGKILIESANPLENAGQDSAVRIEEGKSLRFPLALEEK |
| | | QVLLKEEHSDNVVMPPDQHESKREPVAIKKVQEVQGRDLLSKESLLSGIPEEQRLNLKI |
| | | QICRALQAAVASEQPGLFSEWLRNIEKVEVEAVNITQEPRHIMCMYLVTSAKSVTEEVTT |
| | | HEDVDPQMANLKMELRDALCAHYYEEIDILTAEGPRIQQGAKTSLQEEMDSFSGSQKVE |
| | | PITEPEVESKYLISTEEVSYFNYQSRVKYLDATPVTKGVASAVVSDEKQDESLKPSEPKE |
| | | ESSSESGTEEVATVKIQEAEGGLIKEDGPMIHTPLVDTVSEEGDIVHLTISHNAKEVNW |
| | | YFENKLVPSDEKFKCLQDQNTYTLVIDKVNTEDHQGEYVCEALNDSGKTATSAKLVVKR |
| | | AAPVIKRKIEPLEVALGHLAKFTCEIQSAPNVRFQWFKAGREIYESDKCSIRSSKYISSL |
| | | EILRTQVVDCGEYTCKASNEYGSVSCTATLTVTEAYPFTFLSRPKSLTTFVGKAAKFICT |
| | | VTGTPVIETIWQKDGAALSPSPNWKISDAENKHILELSNLTIQDRGVYSCKASNKFGADI |
| | | OQAEL [symbol] IDKPHFIKELEPVQSAINKKVHLECQVDEDRKVTVTWSKDGQKLPPGKDYKIC |
| | | FEDKIATLEIPLAKLKDSGTYVCTASNEAGSSSCSATVTVREPPSFVKKVDPSYLMLPGE |
| | | SARLHCKLKGSPVIQVTWPKNNKELSESNTVRMYFVNSEAILDITDVKVEDSGSYSCEAV |
| | | NDVGSDSCSTEIVIKEPPSFIKTLEPADIVRGTNALLQCEVSGTGPFEISWFKDKKQIRS |
| | | SKKYRLFSQKSLVCLEIFSFNSADVGEYECVVANEVGKCGCMATHLLKEPPTFVKKVDDL |
| | | IALGGQTVTLQAAVRGSEPISVTWMKGQEVIREDGKIKMSFSNGVAVLHPDVQISFGGK |
| | | YTCLAENEAGSQTSVGELIVKEPAKHERAELIQVTAGDPATLEYTVAGTPELKPKWYKD |
| | | GRPLVASKKYR [symbol] SPKNNVAQLKFYSAELHDSGQYTFEISNEVGSSSCETTFTVLDRDIAP |
| | | FFTKPLRNVDSVVNGTCRLDCKIAGSLPMRVSWFKDGKEIAASDRYRIAFVEGTASLEHI |
| | | RVDMNDAGNFTCRATNSVGSKDSSGALIVQEPPSFVIKPGSKDVLPGSAVCLKSTFQGST |
| | | PLTIRWFKGNKELVSGGSCYITKEALESSLELYLVKTSDSGTYTCKVSNVAGGVECSANL |
| | | FVKEPATFVEKLEPSQLLKKGDATQLACKVTGTPPIKITWFANDREIKESSKHRMSFVES |
| | | TAVLRLTDVGIEDSGEYMCEAQNEAGSDHCSSIVIVKESPYFTKEFKPIEVLKEYDVMLL |
| | | AEVAGTPPFEHWFKDNTILRSGRKYKTFIQDHLVSLQILKFVAADAGEYQCRVTNEVGS |
| | | SICSARVTLREPPSFIKKIESTSSLRGGTAAFQATLKGSLPHVTWLKDSDEITEDDNIR |
| | | MTFENNVASLYLSGIEVKHDGKYVCQAKNDAGIQRCSALLSVKEPATITEEAVSIDVTQG |
| | | DPATLQVKFSGTKEHAKWFKDGQELTLGSKYKISVTDTVSILKHSTEKKDSGEYTFEV |
| | | QNDVGRSSCKARINVLDL [symbol] PPSFTKKLKKMDSIKGSFIDLECIVAGSHPISIQWFKDDQ |
| | | EISASEKYKFSFHDNTAFLEISQLEGTDSGTYTCSATNKAGHNQCSGHLTVKEPPYFVEK |
| | | PQSQDVNPNTRVQLKALVGGTAPMTIKWFKDNKELHSGAARSVWKDDTSTSLELPAAKAT |
| | | DSGTYICQLSNDVGTATSKATLFVKEPPQFIKKPSPVLVLRNGQSTTFECQITGTPKIRV |
| | | SWYLDGNEITAIQKHGISFIDGLATFQISGARVENSGTYVCEARNDAGTASCSIELKVKE |
| | | PPTFIRELKPVEVVKYSDVELECEVTGTPPFEVTWLKNNREIRSSKKYTLTDRVSVFNLH |
| | | TTKCDPSDTGEYQCIVSNEGGSCSCSTRVALKEPPSFIKKIENTTTVLKSSATFQSTVAG |
| | | SPPISITWLKDDQILDEDDNVYISFVDSVATLQIRSVDNGHSGRYTCQAKNESGVERCYA |
| | | PLLVQEPAQ [symbol] VEKAKSVDVTEKDPMTLECVVAGTPELKVKWLKDGKQIVPSRYFSMSPEN |
| | | NVASFRIQSVMKQDSGQYTFKVENDFGSSSCDAYLRVLDQNIPPSFTKKLTKMDKVLGSS |
| | | IHMECKVSGSIPISAQWFKDGKEISTSAKYRLVCHERSVSLEVNNLELEDTANYTCKVSN |
| | | VAGDDACSGILTVKEPPSFLVKPGRQQAIPDSTVEFKAILKGTPPFKIKWFKDDVELVSG |
| | | PKCFIGLEGSTSFLNLYSVDASKTGQYTCHVTNDVGSDSCTTMLLVTEPPKFVKKLEASK |
| | | IVKAGDSSRLECKIAGSPEIRVVWFRNEHELPASDKYRMTFIDSVAVIQMNNLSTEDSGD |
| | | FICEAQNPAGSTSCSTKVIVKEPPVFSSFPPIVETLKNAEVSLECELSGTPPFEVVWYKD |
| | | KRQLRSSKKYKIASKNFHTSIHILNVDTSDIGEYHCKAQNEVGSDTCVCTVKLKEPPRFV |
| | | SKLNSLTVVAGEPAELQASIEGAQPIFVQWLKEKEEVIRESENIRITFVENVATLQFAKA |
| | | EPANAGKYICQIKNDGGMEENMATLMVLEPAVIVEKAGPMTVTVGETCTLECKVAGIPEL |
| | | SVEWYKDGKLLTSSQKHKFSFYNKISSLRILSVERQDAGTYIFQVQNNVGKSSCTAVVDV |
| | | SDRAVPPSFTRRIKNTGGVIGASCIIECKVAGSSPISVAWFHEKTKIVSGAKYQTTFSDN |
| | | VCTLQLNSLDSSDMGNYTCVAANVAGSDECRAVLTVQEPPSFVKEPEPLEVLPGKNVTFT |
| | | SVIRGTPPFKVNWFRGARELVKGDRCNIYFEDTVAELELFNIDISQSGEYTCVVSNNAGQ |
| | | ASCTTRLFVKEPAAFLKRLSDHSVEPGKS [symbol] LESTYTGTLPISVTWKKDGFNITTSEKCN |
| | | IVTTEKTCILEILNSTKRDAGQYSCEIENEAGRDVCGALVSTLEPPYFVTELEPLEAAVG |
| | | DSVSLQOQVAGTPEITVSWYKGDTKLRPTPEYRTYFTNNVATLVFNKVNINDSGEYTCKA |
| | | ENSIGTASSKTVFRIQERQLPPSFARQLKDIEQTVGLPVTLTCRLNGSAPIQVCWYRDGV |
| | | LLRDDENLQTSFVDNVATLKILQTDLSHSGQYSCSASNPLGTASSSARLTAREPKKSPFF |
| | | DIKPVSIDVIAGESADFECHVTGAQPMRITWSKDNKEIRPGGNYTITCVGNTPHLRILKV |
| | | GKGDSGQYTCQATNDVGKDMCSAQLSVKEPPKFVKKLEASKVAKQGESIQLECKISGSPE |
| | | IKVSWFRNDSELHESWKYNMSFINSVALLTINEASAEDSGDYICEAHNGVGDASCSTALT |
| | | VKAPPVFTQKPSPVGALKGSDVILQCEISGTPPFEVVWVKDRKQVRNSKKFKITSKHFDT |
| | | SLHILNLEASDVGEYHCKATNEVGSDTCSCSVKFKEPPRFVKKLSDTSTLIGDAVELRAI |
| | | VEGFQPISVVWLKDRGEVIRESENTRISFIDNIATLQLGSPEASNSGKYICQIKNDAGMR |
| | | ECSAVLTVLEPARHEKPEPMTVTTGNPFALECVVTGTPELSAKWFKDGRELSADSKHHI |
| | | TFINKVASLKIPCAEMSDKGLYSPEVKNSVGKSNCTVSVHVSDRIVPPSFIRKLKDVNAI |
| | | LGASVVLECRVSGSAPISVGWPQDGNEIVSGPKCQSSFSENVCTLNLSLLEPSDTGIYTC |
| | | VAANVAGSDECSAVLTVQEPPSFEQTPDSVEVLPGMSLTFTSVIRGTPPFKVKWFKGSRE |
| | | IVPGESCNISLEDFVTELELFEVQPLESGDYSCLVTNDAGSASCTTHLFVKEPATFVKRL |
| | | ADFSVETGSPIVLEATYTGTPPISVSWIKDEYLISQSERCSTTMTEKSTILEILESTIED |
| | | YAQYSCLIENEAGQDICEALVSVLEPPYFIEPLEHVEAVIGEPATLQCKVDGTPEIRISW |
| | | YKEHTKLRSAPAYKMQFKNNVASLVINKVDHSDVGEYSCKADNSVGAVASSAVLVIKERK |
| | | LPPFFARKLKDVHETLGFPVAFECRINGSEPLQVSWYKDGVLLKDDANLQTSFVHNVATL |
| | | QIIQTDQSHIGQYNCSASNPLGTASSSAKIIISEHEVPPFFDLKPVSVDLALGESGTFKC |
| | | HVTGTAPIKITWAKDNREIRPGGNYKMIIVENTATITVIKVGKGDAGQYTCYASNIAGKD |
| | | SCSAHLGVQEPPRFIKKLEPSRIVKQDEFTRYECKIGGSPEIKVLWYKDETEIQESSKFR |
| | | MSFVDSVAVLEMHNLSVEDSGDYTCEAHNAAGSASSSTSIKVKEPPIFRKKPHPIETLKG |
| | | ADVHLECELQGTPPFHVSWYKDKRELRSGKKYKIMSENFLTSIHILNVDAADIGEYQCKA |
| | | TNDVGSDTCVGSIALKAPPRFVKKLSDISTVVGKEVQLQTTIEGAEPISVVWFKDKGEIV |
| | | RESDNIWISYSENIATLQFSRVEPANAGKYTCQIKNDAGMQECFATLSVLEPATIVEKPE |
| | | SIKVTTGDTCTLECTVAGTPELSTKWFKDGKELTSDNKYKISFFNKVSGLKIINVAPSDS |
| | | GVYSFEVQNPVGKDSCTASLQVSDRTVPPSFTRKLKETNGLSGSSVVMECKVYGSPPISV |
| | | SWFHEGNEISSGRKYQTTLTDNTCALTVNMLEESDSGDYTCIATNMAGSDECSAPLTVRE |
| | | PPSFVQKPDPMDVLTGTNVTFTSIVKGTPPFSVSWFKGSSELVPGDRCNVSLEDSVAELE |
| | | LFDVDTSQSGEYTCIVSNEAGKASCTTHLYIKAPAKFVKRLNDYSIEKGKPLILEGTFTG |
| | | TPPISVTWKKNGINVTPSQRCNITTTEKSAILEIPSSTVEDAGQYNCYIENASGKDSCSA |
| | | QILILEPPYFVKQLEPVKVSVGDSASLQCQLAGTPEIGVSWYKGDTKLRPTTTYKMHFRN |
| | | NVATLVFNQVDINDSGEYICKAENSVGEVSASTFLTVQEQKLPPSFSRQLRDVQETVGLP |
| | | VVPDCAISGSEPISVSWYKDGKPLKDSPNVQTSFLDNTATLNIFKTDRSLAGQYSCTATN |
| | | FIGSASSSARLILTEGKNPPFFDIRLAPVDAVVGESADFECHVTGTQPIKVSWAKDSREI |
| | | RSGGKYQISYLENSAHLTVLKVDKGDSGQYTCYAVNEVGKDSCTAQLNIKERLIPPSFTK |
| | | RLSETVEETEGNSFKLEGRVAGSQPHVAWYKNNIEIQPTSNCEITFKNNTLVLQVRKAG |
| | | MNDAGLYTCKVSNDAGSALCTSSIVIKEPKKPPVFDQHLTPVTVSEGEYVQLSCHVQGSE |
| | | PIRIQWLKAGREIKPSDRCSFSFASGTAVLELRDVAKADSGDYVCKASNVAGSDTTKSKV |
| | | TIKDKPAVAPATKKAAVDGRLFFVSEPQSIRVVEKTTATFIAKVGGDPIPNVKWTKGKWR |
| | | QLNQGGRVFIHQKGDEAKLEIRDTTKTDSGLYRCVAFNEHGEIESNVNLQVDERKKQEKI |
| | | EGDLRAMLKKTPILKKGAGEEEEIDIMELLKNVDPKEYEKYARMYGITDFRGLLQAFELL |
| | | KQSQEEETHRLEIEEIERSERDEKEPEELVSFIQQRLSQTEPVTLIKDIENQTVLKDNDA |
| | | VPEIDIKINYPEIKISWYKGTEKLEPSDKPEISIDGDRHTLRVKNCQLKDQGNYRLVCGP |
| | | HIASAKLTVIEPAWERHLQDVTLKEGQTCTMTQQFSVPNVKSEWRNGRILKPQGRHKTE |
| | | VEHKVHKLTIADVRAEDQGQYTCKYEDLETSAELRIEAEPIQFTKRIQNIVVSEHQSATF |
| | | ECEVSFDDAIVTWYKGPTELTESQKYNFRNDGRCHYMTIHNVTPDDEGVYSVIARLEPRG |
| | | EARSTAELYLTTKEIKLELKPPDIPDSRVPIPTMPIRAVPPEEIPPVVAPPIPLLLPTPE |
| | | EKKPPPKRIEVTKKAVKKDAKKVVAKPKEMTPREEIVKKPPPPTTLIPAKAPEIIDVSSK |
| | | AEEVKIMTHRKKEVQKEKEAVYEKKQAVHKEKRVFIESFEEPYDELEVEPYTEPPEQPY |
| | | YEEPDEDYEEIKVEAKKEVHEEWEEDFEEGQEYYEREEGYDEGEEEWEEAYQEREVIQVQ |
| | | KEVYEESHERKVPAKVPEKKAPPPPKVIKKPVIEKIEKTSRRMEEEKVQVIKVPEVSKKI |
| | | VPQKPSRTPVQEEVIEVKVPAVHTKKMVISEEKMFFASHTEEEVSVTVPEVQKEIVTEEK |
| | | IHVAVSKRVEPPPKVPELPEKPAPEEVAPVPIPKKVEPPAPKVPEVPKKPVPEEKKPVPV |
| | | PKKEPAAPPKVPEVPKKPVPEEKIPVPVAKKKEAPPAKVPEVQKRVVTEEKITIVTQREE |
| | | SPPPAVPEIPKKKVPEERKPVPRKEEEVPPPPKVPALPKKPVPEEKVAVPVPVAKKAPPP |
| | | RAEVSKKTVVEEKRFVAEEKLSPAVPQRVEVTRHEVSAEEEWSYSEEEEGVSISVYREEE |
| | | REEEEEAEVTEYEVMEEPEEYVVEEKLHIISKRVEAEPAEVTERQEKKIVLKPKIPAKIE |
| | | EPPPAKVPEAPKKIVPEKKVPAPVPKKEKVPPPKVPEEPKKPVPEKKVPPKVIKMEEPLP |
| | | AKVTERHMQHQEEKVLVAVTKKEAPPKARVPEEPKRAVPEEKVLKLKPKREEEPPAKVT |
| | | EFRKRVVKEEKVSIEAPKREPQPIKEVTIMEEKERAYTLEEEAVSVQREEEYEEYEEYDY |
| | | KEFEEYEPTEEYDQYEEYEEREYERYEEHEEYITEPEKPIPVKPVPEEPVPTKPKAPPAK |
| | | VLKKAVPEEKVPVPIPKKLKPPPPKVPEEPKKVFEEKIRISITKREKEQVTEPAAKVPMK |
| | | PKRVVAEEKVPVPRKEVAPPVRVPEVPKELEPEEVAFEEEVVTHVEEYLVEEEEEYIHEE |
| | | EEFITEEEVVPVIPVKVPEVPRKPVPEEKKPVPVPKKKEAPPAKVPEVPKKPEEKVPVLI |
| | | PKKEKPPPAKVPEVPKKPVPEEKVPVPVPKKVEAPPAKVPEVPKKPVPEKKVPVPAPKKV |
| | | EAPPAKVPEVPKKLIPEEKKPTPVFKKVEAPPPKVPKKREPVPVPVALPQEEEVLFEEEI |
| | | VPEEEVLPEEEEVLPEEEEVLPEEEEVLPEEEEIPPEEEEVPPEEEYVPEEEEFVPEEEV |
| | | LPEVKPKVPVPAPVPEIKKKVTEKKVVIPKKEEAPPAKVPEVPKKVEEKRIILPKEEEVL |
| | | PVEVTEEPEEEPISEEEIPEEPPSIEEVEEVAPPRVPEVIKKAVPEAPTPVPKKVEAPPA |
| | | KVSKKIPEEKVPVPVQKKEAPPAKVPEVPKKVPEKKVLVPKKEAVPPAKGRTVLEEKVSV |
| | | AFRQEVVVKERLELEVVEAEVEEIPEEEEFHEVEEYFEEGEFHEVEEFIKLEQHRVEEEH |
| | | RVEKVHRVIEVFEAEEVEVFEKPKAPPKGPEISEKIIPPKKPPTKVVPRKEPPAKVPEVP |
| | | KKIVVEEKVRVPEEPRVPPTKVPDVLPPKEVVPEKKVPVPPAKKPEAPPPKVPEAPKEVV |
| | | PEKKVPVPPPKKPEVPPTKVPEVPKAAVPEKKVPEAIPPKPESPPPEVPEAPKEVVPEKK |
| | | VPAAPPKKPEVTPVKVPEAPKEVVPEKKVPVPPPKKPEVPPTKVPEVPKVAVPEKKVPEA |
| | | IPPKPESPPPEVFEEPEEVALEEPPAEVVEEPEPAAPPQVTVPPKKPVPEKKAPAVVAKK |
| | | PELPPVKVPEVPKEVVPEKKVPLVVPKKPEAPPAKVPEVPKEVVPEKKVAVPKKPEVPPA |
| | | KVPEVPKKPVLEEKPAVPVPERAESPPPEVYEEPEEIAPEEEIAPEEEKPVPVAEEEEPE |
| | | VPPPAVPEEPKKIIPEKKVPVIKKPEAPPPKEPEPEKVIEKPKLKPRPPPPPPAPPKEDV |
| | | KEKIFQLKAIPKKKVPEKPQVPEKVELTPLKVPGGEKKVRKLLPERKPEPKEEVVLKSVL |
| | | RKRPEEEEPKVEPKKLEKVKKPAVPEPPPPKPVEEVEVPTVTKRERKIPEPTKVPEIKPA |
| | | IPLPAPEPKPKPEAEVKTIKPPPVEPEPIPIAAPVTVPVVGKKAEAKAPKEEAAKPKGPI |
| | | KGVPKKTPSPIEAERRKLRPGSGGEKPPDEAPFTYQLKAVPLKFVKEIKDIILTESEFVG |
| | | SSAIFECLVSPSTAITTWMKDGSNIRESPKHRFIADGKDRKLHIIDVQLSDAGEYTCVLR |
| | | LGNKEKTSTAKLVVEELPVRFVKTLEEEVTVVKGQPLYLSCELNKERDVVWRKDGKIVVE |
| | | KPGRIVPGVIGLMRALTINDADDTDAGTYTVTVENANNLECSSCVKVVEVIRDWLVKPIR |
| | | DQHVKPKGTAIFACDIAKDTPNIKWFKGYDEIPAEPNDKTEILRDGNHLYLKIKNAMPED |
| | | IAEYAVEIEGKRYPAKLTLGEREVELLKPIEDVTIYEKESASPDAEISEADIPGQWKLKG |
| | | ELLRPSPTCEIKAEGGKRFLTLRKVKLDQAGEVLYQALNAITTAILTVKEIELDFAVPLK |
| | | DVTVPERRQARFECVLTREANVIWSKGPDIIKSSDKFDIIADGKKHILVINDSQFDDEGV |
| | | YTAEVEGKKTSARLFVTGIRLKFMSPLEDQTVKEGETATFVCELSHEKMHVVWFKNDAKL |
| | | HTSRTVLISSEGKTHKLEMKEVTLDDISQIKAQVKELSSTAQLKVLEADPYFTVKLHDKT |
| | | AVEKDEITLKCEVSKDVPVKWFKDGEEIVPSPKYSIKADGLRRILKIKKADLKDKGEYVC |
| | | DCGTDKTKANVTVEARLIKVEKPLYGVEVPVGETAHFEIELSEPDVHGQWKLKGQPLTAS |
| | | PDCEIIEDGKKHILILHNCQLGMTGEVSFQAANAKSAANLKVKELPLIFITPLSDVKVFE |
| | | KDEAKFECEVSREPKTFRWLKGTQEITGDDRFELJKDGTKHSMVIKSAAFEDEAKYMFEA |
| | | EDKHTSGKLIIEGIRLKFLTPLKDVTAKEKESAVFTVELSHDNIRVKWFKNDQRLHTTRS |
| | | VSMQDEGKTHSITFKDLSIDDTSQIRVEAMGMSSEAKLTVLEGDPYFTGKLQDYTGVEKD |
| | | EVILQCEISKADAPVKWFKDGKEIKPSKNAVIKADGKKRMLILKKALKSDIGQYTCDCGT |
| | | DKTSGKLDIEDREIKLVRPLHSVEVMETETARFETEISEDDIHANWKLKGEALLQTPDCE |
| | | IKEEGKIHSLVLHNCRLDQTGGVDFQAANVKSSAHLRVKPRVIGLLRPLKDVTVTAGETA |
| | | TFDCELSYEDIPVEWYLKGKKLEPSDKVVPRSEGKVHTLTLRDVKLEDAGEVQLTAKDFK |
| | | THANLFVKEPPVEFTKPLEDQTVEEGATAVLECEVSRENAKVKWFKNGTEILKSKKYEIV |
| | | ADGRVRKLVIHDCTPEDIKTYTCDAKDFKTSCNLNVVPPHVEFLRPLTDLQVREKEMARF |
| | | ECELSRENAKVKWFKDGAEIKKGKKYDHSKGAVRILVINKCLLDDEAEYSCEVRTARTS |
| | | GMLTVLEEEAVFTKNLANIEVSETDTIKLVCEVSKPGAEVIWYKGDEEIIETGRYEILTE |
| | | GRKRILVIQNAHLEDAGNYNCRLPSSRTDGKVKVHELAAEFISKPQNLEILEGEKAEPVC |
| | | SISKESPPVQWKRDDKTLESGDKYDVIADGKKRVLVVKDATLQDMGTYVVMVGAARAAAH |
| | | LTVIEKLRIVVPLKDTRVKEQQEVVFNCEVNTEGAKAKWFRNEEAIFDSSKYIILQKDLV |
| | | YTLRIRDAHLDDQANYNVSLTNHRGENVKSAANLIVEEEDLRIVEPLKDIETMEKKSVTF |
| | | WCKVNRLNVTLKWTKNGEEVPFDNRVSYRVDKYKHMLTIKDCGFPDEGEYIVTAGQDKSV |
| | | AELLIIEAPTEFVEHLEDQTVTEFDDAVPSCQLSREKANVKWYRNGREIKEGKKYKFEKD |
| | | GSIHRLIIKDCRLDDECEYACGVEDRKSRARLFVEEIPVEIIRPPQDILEAPGADVVFLA |
| | | ELNKDKVEVQWLRNNMVVVQGDKHQMMSEGKIHRLQICDIKPRDQGEYRFIAKDKEARAK |
| | | LELAAAPKIKTADQDLVVDVGKPLTMVVPYDAYPKAEAEWFKENEPLSTKTIDTTAEQTS |
| | | FRILEAKKGDKGRYKIVLQNKHGKAEGFINLKVIDVPGPVRNLEVTETFDGEVSLAWEEP |
| | | LTDGGSKIIGYVVERRDIKRKTWVLATDRAESCEFTVTGLQKGGVEYLFRVSARNRVGTG |
| | | EPVETDNPVEARSKYDVPGPPLNVTITDVNRFGVSLTWEPPEYDGGAEITNYVIELRDKT |
| | | SIRWDTAMTVRAEDLSATVTDVVEGQEYSFRVRAQNRIGVGKPSAATPFVKVADPIERPS |
| | | PPVNLTSSDQTQSSVQLKWEPPLKDGGSPILGYIIERCEEGKDNWIRCNMKLVPELTYKV |
| | | TGLEKGNKYLYRVSAENKAGVSDPSEILGPLTADDAFVEPTMDLSAFKDGLEVIVPNPIT |
| | | ILVPSTGYPRPTATWCFGDKVLETGDRVKMKTLSAYAELVISPSERSDKGIYTLKLENRV |
| | | KTISGEIDVNVIARPSAPKELKFGDITKDSVHLTWEPPDDDGGSPLTGYVVEKREVSRKT |
| | | WTKVMDFVTDLEFTVPDLVQGKEYLFKVCARNKCGPGEPAYVDEPVNMSTPATVPDPPEN |
| | | VKWRDRTANSIFLTWDPPKNDGGSRIKGYIVERCPRGSDKWVACGEPVAETKMEVTGLEE |
| | | GKWYAYRVKALNRQGASKPSRPTEEIQAVDTQEAPEIFLDVKLLAGLTVKAGTKIELPAT |
| | | VTGKPEPKITWTKADMILKQDKRITIENVPKKSTVIIVDSKRSDTGTYIIEAVNVCGRAT |
| | | AVVEVNVLDKPGPPAAFDITDVTNESCLLTWNPPRDDGGSKITNYVVERRATDSEVWHKL |
| | | SSTVKDTNFKATKLIPNKEYIFRVAAENMYGVGEPVQASPITAKYQFDPPGPPTRLEPSD |
| | | ITKDAVTLTWCEPDDDGGSPITGYWVERLDPDTDKWVRCNKMPVKDTIYRVKGLTNKKKY |
| | | RPRVLAENLAGPGKPSKSTEPILIKDPIDPPWPPGKPTVKDVGKTSVRLNWTKPEHDGGA |
| | | KIESYVIEMLKTGTDEWVRVAEGVFITQHLLPGLMEGQEYSFRVRAVNKAGESEPSEPSD |
| | | PVLCREKLYPPSPPRWLEVINITKNTADLKWTVPEKDGGSPITNYIVEKRDVRRKGWQTV |
| | | DTTVKDTKCTVTPLTEGSLYVFRVAAENAIGQSDYTEIEDSVLAKDTFTTPGPPYALAVV |
| | | DVTKRHVDLKWEPPKNDGGRPIQRYVIEKKERLGTRWVKAGKTAGPDCNFRVIDVIEGTE |
| | | VQFQVRAENEAGVGHPSEPTEILSIEDPTSPPSPPLDLHVTDAGRKHIAIAWKPPEKNGG |
| | | SPIIGYHVEMCPVGTEKWMRVNSRPIKDLKFKVEEGVVPDKEYVLRVRAVNAIGVSEPSE |
| | | ISENVVAKDPDCKPTIDLETHDIIVIEGEKLSIPVPFRAVPVPTVSWHKDGKEVKASDRL |
| | | TMKNDHISAHLEVPKSVRADAGIYTITLENKLGSATASINVKVIGLPGPCKDIKASDITK |
| | | SSCKLTWEPPEFDGGTPILHYVLERREAGRRTYIPVMSGENKLSWTVKDLIPNGEYFFRV |
| | | KAVNKVGGGEYIELKNPVIAQDPKQPPDPPVDVEVHNPTAEAMTTTWKPPLYDGGSKIMG |
| | | YIIEKIAKGEERWKRCNEHLVPILTYTAKGLEEGKEYQFRVRAENAAGISEPSRATPPTK |
| | | AVDPIDAPKVILRTSLEVKRGDEIALDASISGSPYPTHWIKDENVIVPEEIKKRAAPLV |
| | | RRRKGEVQEEEPFVLPLTQRLSIDNSKKGESQLRVRDSLRPDHGLYMIKVENDHGIAKAP |
| | | CTVSVLDTPGPPINPVFEDIRKTSVLCKWEPPLDDGGSEIINYTLEKKDKTKPDSEWIVV |
| | | TSTLRHCKYSVTKLIEGKEYLFRVRAENRFGPGPPCVSKPLVAKDPFGPPDAPDKPIVED |
| | | VTSNSMLVKWNEPKDNGSPILGYWLEKREVNSTHWSRVNKSLLNALKANVDGLLEGLTYV |
| | | FRVCAENAAGPGKFSPPSDPKTAHDPISPPGPPIPRVTDTSSTTIELEWEPPAFNGGGEI |
| | | VGYFVDKQLVGTNEWSRCTEKMIKVRQYTVKEIREGADYKLRVSAVNAAGEGPPGETQPV |
| | | TVAEPQEPPAVELDVSVKGGIQIMAGKTLRIPAVVTGRPVPTKVWTKEEGELDKDRVVID |
| | | NVGTKSELIIKDALRKDHGRYVITATNSCGSKFAAARVEVFDVPGPVLDLKPVVTNRKMC |
| | | LLNWSDPEDDGGSEITGFIIERKDAKMHTWRQPIETERSKCDITGLLEGQEYKFRVIAKN |
| | | KFGCGPPVEIGPILAVDPLGPPTSPERLTYTERTKSTHLDWKEPRSNGGSPIQGYIIEK |
| | | RRHDKPDFERVNKRLCPTTSFLVENLDEHQMYEFRVKAVNEIGESEPSLPLNVVIQDDEV |
| | | PPTIKLRLSVRGDTIKVKAGEPVHIPADVTGLPMPKIEWSKNETVIEKPTDALQHKEEV |
| | | SRSEAKTELSIPKAVREDKGTYTVTASNRLGSVFRNVHVEVYDRPSPPRNLAVTDIKAES |
| | | CYLTWDAPLDNGGSEITHYVIDKRDASRKKAEWEEVINTAVEKRYGIWKLIPNGQYEFRV |
| | | RAYNKYGISDECKSDKVVIQDPYRLPGPPGKPKVLARTKGSMLVSWTPPLDNGGSPITGY |
| | | WLEKREEGSPYWSRVSRAPITKVGLKGVEFNVPRLLEGVKYQFRAMAINAAGIGPPSEPS |
| | | DPEVAGDPIFPPGPPSCPEVKDKTKSSISLGWKPPAKDGGSPIKGYIVEMQEEGTTDWKR |
| | | VNEPDKLITTCECVVPNLKELRKYRFRVKAVNEAGESEPSDTTGEIPATDIQEEPEVFID |
| | | IGAQDCLVCKAGSQIRIPAVIKGRPTPKSSWEFDGKAKKAMKDGVHDIPEDAQLETAENS |
| | | SVIIIPECKRSHTGKYSITAKNKAGQKTANCRVKVMDVPGPPKDLKVSDITRGSCRLSWK |
| | | MPDDDGGDRIKGYVIEKRTIDGKAWTKVNPDCGSTTFVVPDLLSEQQYFFRVRAENRFGI |
| | | GPPVETIQRTTARDPIYPPDPPIKLKIGLITKNTVHLSWKPPKNDGGSPVTHYIVECLAW |
| | | DPTGTKKEAWRQCNKRDVEELQFTVEDLVEGGEYEFRVKAVNAAGVSKPSATVGPCDCQR |
| | | PDMPPSIDLKEFMEVEEGTNVNIVAKIKGVPFPTLTWFKAPPKKPDNKEPVLYDTHVNKL |
| | | VVDDTCTLVIPQSRRSDTGLYTITAVNNLGTASKEMRLNVLGRPGPPVGPIKFESVSADQ |
| | | MTLSWFPPKDDGGSKITNYVIEKREANRKTWVHVSSEPKECTYTIPKLLEGHEYVFRIMA |
| | | QNKYGIGEPLDSEPETARNLFSVPGAPDKPTVSSVTRNSMTVNWEEPEYDGGSPVTGYWL |
| | | EMKDTTSKRWKRVNRDPIKAMTLGVSYKVTGLIEGSDYQPRVYAINAAGVGPASLPSDPA |
| | | TARDPIAPPGPPFPKVTDWTKSSADLEWSPPLKDGGSKVTGYIVEYKEEGKEEWEKGKDK |
| | | EVRGTKLVVTGLKEGAFYKFRVSAVNIAGIGEPGEVTDVIEMKDRLVSPDLQLDASVRDR |
| | | IVVHAGGVIRIIAYVSGKPPPTVTWNMNERTLPQEATIETTAISSSMVIKNCQRSHQGVY |
| | | SLLAKNEAGERKKTIIVDVLDVPGPVGTPFLAHNLTNESCKLTWFSPEDDGGSPHNYVI |
| | | EKRESDRRAWTPVTYTVTRQNATVQGLIQGKAYFFRIAAENSIGMGPFVETSEALVIREP |
| | | ITVPERPEDLEVKEVTKNTVILTWNPPKYDGGSEIINYVLESRLIGTEKFHKVTNDNLLS |
| | | RKYTVKGLKEGDTYEYRVSAVNIVGQGKPSFCTKPITCKDELAPPTLHLDFRDKLTIRVG |
| | | EAPALTGRYSGKPKPKVSWFKDEADVLEDDRTHIKTTPATLALEKIKAKRSDSGKYCVVV |
| | | ENSTGSRKGFCQVNVVDRPGPPVGPVSFDEVTKDYMVISWKPPLDDGGSKITNYIIEKKE |
| | | VGKDVWMPVTSASAKTTCKVSKLLEGKDYIFRIHAENLYGISDPLVSDSMKAKDRFRVPD |
| | | APDQPIVTEVTKDSALVTWNKPHDGGKPITNYILEKRETMSKRWARVTKDPIHPYTKFRV |
| | | PDLLEGCQYEFRVSAENEIGIGDPSPPSKPVFAKDPIAKPSPPVNPEAIDTTCNSVDLTW |
| | | QPPRHDGGSKILGYIVEYQKVGDEEWRRANHTPESCPETKYKVTGLRDGQTYKPRVIAVN |
| | | AAGESDPAHVPEPVLVKDRLEPPELILDANMAREQHIKVGDTLRISAIIKGVPFPKVTWK |
| | | KEDRDAPTKARIDVTPVGSKLEIRNAAHEDGGIYSLTVENPAGSKTVSVKVLVLDKPGPP |
| | | RDLEVSEIRKDSCYLTWKEPLDDGGSVITNYVVERRDVASAQWSPLSATSKKKSHFAKHL |
| | | NEGNQYLPRVAAENQYGRGPFVETPKPIKALDPLHPPGPPKDLHHVDVDKTEVSLVWNKP |
| | | DRDGGSPIIGYLVEYQEEGTQDWIKFKTVTNLECVVTGLQQGKTYRFRVKAENIVGLGLP |
| | | DTTIPIECQEKLVPPSVELDVKLIEGLVVKAGTTVRFPAIIRGVPVPTAKWTTDGSEIKT |
| | | DEHYTVETDNFSSVLTIKNCLRRDTGEYQHVSNAAGSKTVAVHLTVLDVPGPPTGPINI |
| | | LDVIPEHMTISWQPPKDDGGSPVINYIVEKQDTRKDTWGVVSSGSSKTKLKIPHLQKGCE |
| | | YVPRVRAENKIGVGPPLDSTPIVAKHKPSPPSPPGKPVVTDITENAATVSWTLPKSDGGS |
| | | PITGYYMERREVTGKWVRVNKTPIADLKFRVTGLYEGNTYEFRVFAENLAGLSKPSPSSD |
| | | PIKACRPIKPPGPPINPKLKDKSRETADLVWTKPLSDGGSPILGYVVECQKPGTAQWNRI |
| | | NKDELIRQCAFRVPGLIEGNEYRFRIKAANIVGEGEPRELAESVIAKDIIHPPEVELDVT |
| | | CRDVITVRVGQTIRILARVKGRPEPDITWTKEGKVLVREKRVDLIQDLPRVELQIKEAVR |
| | | ADHGKYIISAKNSSGHAQGSAIVNVLDRPGPCQNLKVTNVTKENCIISWENPLDNGGSEI |
| | | TNFIVEYRKPNQKGWSIVASDVTKRLIKANLLANNEYYFRVCAENKVGVGPTIETKTPIL |
| | | AINPIDRPGEPENLHIADKGKTFVYLKWRRPDYDGGSPNLSYHVERRLKGSDDWERVHKG |
| | | SIKETHYMVDRCVENQIYEPRVQTKNEGGESDWVKTEEVVVKEDLQKPVLDLKLSGVLTV |
| | | KAGDTIRLEAGVRGKPFPEVAWTKDKDATDLTRSPRVKIDTRADSSKFALTKAKRSDGGK |
| | | YVVTATNTAGSFVAYATVNVLDKPGPVRNLKIVDVSSDRCTVCWDPPEDDGGCEIQNYIL |
| | | EKCETKRMVWSTYSATVLTPGTTVIRLIEGNEYIFRVRAENKIGTGPPTESKPVIAKTKY |
| | | DKPGRPDPPEVTKVSKEEMTVVWNPPEYDGGKSITGYFLEKKEKHSTRWVPVNKSAIPER |
| | | RMKVQNLLPDHEYQPRVKAENEIGIGEPSLPSRPVVAKDPIEPPGPPTNFRVVDTTKHSI |
| | | TLGWGKPVYDGGAPIIGYVVEMRPKIADASPDEGWKRCNAAAQLVRKEFTVTSLDENQEY |
| | | EFRVCAQNQVGIGRPAELKEAIKPKEILEPPEIDLDASMRKLVIVRAGCPIRLFAIVRGR |
| | | PAPKVTWRKVGIDNVVRKGQVDLVDTMAPLVIPNSTRDDSGKYSLTLVNPAGEKAVFVNV |
| | | RVLDTPGPVSDLKVSDVTKTSCHVSWAPPENDGGSQVTHYIVEKREADRKTWSTVTPEVK |
| | | KTSFHVTNLVPGNEYYFRVTAVNEYGPGVPTDVPKPVLASDPLSEPDPPFKLEVTEMTKN |
| | | SATLAWLPPLRDGGAKIDGYITSYREEEQPADRWTEYSVVKDLSLVVTGLKEGKKYKFRV |
| | | AARNAVGVSLFREAEGVYEAKEQLLPPKILMPEQITIKAGKKLRIEAHVYGKPHPTCKWK |
| | | KGEDEVVTSSHLAVHKADSSSILIIKDVTRKDSGYYSLTAENSSGTDTQKIKVVVMDAPG |
| | | PPQPPFDISDIDADACSLSWHIPLEDGGSNITNYIVEKCDVSRGDWVTALASVTKTSCRV |
| | | GKLIPGQEYIFRVRAENRFGISEPLTSPKMVAQPPPGVPSEPKNARVTKVNKDCIPVAWD |
| | | RPDSDGGSPIIGYLIERKERNSLLWVKANDILVRSTEYPCAGLVEGLEYSPRIYALNKAG |
| | | SSPPSKPTEYVTARMPVDPPGKPEVIDVTKSTVSLIWARPKHDGGSKIIGYFVEACKIPG |
| | | DKWVRCNTAPHQIPQEEYTATGLEEKAQYQFRAIARTAVNISPPSEPSDPVTILAENVPP |
| | | RIDLSVAMKSLLTVKAGTNVCLDATVFGKPMPTVSWKKDGTLLKPAEGIKMAMQRNLCTL |
| | | ELPSVNRKDSGDYTITAENSSGSKSATIKLKVLDKPGPPASVKINKMYSDRAMLSWEPPL |
| | | EDGGSEITNYIVDKRETSRPNWAQVSATVPITSCSVEKLIEGHEYQFRICAENKYGVGDP |
| | | VFTEPAIAKNPYDPPGRCDPPVISNITKDHMTVSWKPPADDGGSPIIGYLLEKRETQAVN |
| | | WTKVNRKPIIERTLKATGLQEGTEYEFRVTAINKAGPGKPSDASKAAYARDPQYPPAPPA |
| | | PPKVYDTTRSSVSLSWGKPAYDGGSPIIGYLVEVKRADSDNWVRCNLPQNLQKTRFEVTG |
| | | LMEDTQYQFRVYAVNKIGYSDPSDVPDKHYPKDILIPPEGELDADLRKTLILRAGVTMRL |
| | | YVPVKGRPPPKITWSKPNVNLRDRIGLDIKSTDFDTFLRCENVNKYDAGKYILTLENSCG |
| | | KKEYTIVVKVLDTPGPPVNVTVKEISKDSAYVTWEPPIIDGGSPINYVVQKRDAERKSW |
| | | STVTTECSKTSFRVANLEEGKSYFFRVFAENEYGIGDPGETRDAVKASQTPGPVVDLKVR |
| | | SVSKSSCSIGWKKPHSDGGSRIIGYVVDFLTEENKWQRVMKSLSQYSAKDLTEGKEYTF |
| | | RVSAENENGEGTPSEITVVARDDVVAPDLDLKGLPDLCYLAKENSNFRLKIPIKGKPAPS |
| | | VSWKKGEDPLATDTRVSVESSAVNTTLIVYDCQKSDAGKYTITLKNVAGTKEGTISIKVV |
| | | GKPGIPTGPIKFDEVTAEAMTLKWAPPKDDGGSEHNYILEKRDSVNNKWVTCASAVQKT |
| | | TFRVTRLHEGMEYTFRVSAENKYGVGEGLKSEPIVARHPFDVPDAPPPPNIVDVRHDSVS |
| | | LTWTDPKKTGGSPITGYHIEPKERNSLLWKRANKTPIRMRDFKVTGLTEGLEYEFRVMAI |
| | | NLAGVGKPSLPSEPVVALDPIDPPGKPEVINITRNSVTLIWTEPKYDGGHKLTGYIVEKR |
| | | DLPSKSWMKANHVNVPECAFTVTDLVEGGKYEFRIRAKNTAGAISAPSESTEIHCKDEY |
| | | EAPIIVLDPTIKDGLTIKAGDTIVLNAISILGKPLPKSSWSKAGKDIRPSDHQITSTPT |
| | | SSMLTIKYATRKDAGEYTITATNPFGTKVEHVKVTVLDVPGPPGPVEISNVSAEKATLTW |
| | | TPPLEDGGSPIKSYILEKRETSRLLWTVVSEDIQSCRHVATKLIQGNEYIPRVSAVNHYG |
| | | KGEPVQSEPVKMVDRGPPGPPEKPEVSNVTKNTATVSWKRPVDDGGSEITGYHVERREK |
| | | KSLRWVRAIKTPVSDLRCKVIGLQEGSTYEFRVSAENRAGIGPPSEASDSVLMKDAAYPP |
| | | GPPSNPHVTDTTKKSASLAWGKPHYDGGLEITGYVVEHQKVGDEAWIKDTTGTALRIIQF |
| | | VVPDLQTKEKYNFRISAINDAGVGEPAVIPDVEIVEREMAPDFELDAELRRTLVVRAGLS |
| | | IRIFVPIKGRPAPEVTWTKDNINLKNRANIENTESFTLLIIPECNRYDTGKFVMTIENPA |
| | | GKKSGFVNVRVLDTPGPVLNLRPTDITKDSVTLHWDLPLIDGGSRHNYIVEKREATRKS |
| | | YSTATIKCHKCTYKVTGLSEGCEYFFRVMAENEYGIGEPTETTEPVKASEAPSPPDSLNI |
| | | MDITKSTVSLAWPKPKHDGGSKITGYVIEAQRKGSDQWTHITTVKGLECVVRNLTEGEEY |
| | | TPQVMAVNSAGRSAPRESRPVIVKEQTMLPELDLRGIYQKLVIAKAGDNIKVEIPVLGRP |
| | | KPTVTWKKGDQILKQTQRVNFETTATSTILNINECVRSDSGPYPLTARNIVGEVGDVITI |
| | | QVHDIPGPPTGPIKFDEVSSDFVTFSWDPPENDGGVPISNYVVEMRQTDSTTWVELATTV |
| | | IRTTYKATRLTTGLEYQFRVKAQNRYGVGPGITSACIVANYPFKVPGPPGTPQVTAVTKD |
| | | SMTISWHEPLSDGGSPILGYHVERKERNGILWQTVSKALVPGNIFKSSGLTDGIAYEFRV |
| | | IAENMAGKSKPSKPSEPMLALDPIDPPGKPVPLNITRHTVILKWAKPEYTGGFKITSYIV |
| | | EKRDLPNGRWLKANFSNILENEFTVSGLTEDAAYEFRVIAKNAAGAISPPSEPSDAITCR |
| | | DDVEAPKIKVDVKFKDTVILKAGEAFRLEADVSGRPPPTMEWSKDGKELEGTAKLEIKIA |
| | | DFSTNLVNKDSTRRDSGAYTLTATNPGGFAKHIFNVKVLDRPGPPEGPLAVTEVTSEKCV |
| | | LSWFPPLDDGGAKIDHYIVQKRETSRLAWTNVASEVQVTKLKVTKLLKGNEYIFRVMAVN |
| | | KYGVGEPLESEPVLAVNPYGPPDPPKNPEVTTTTKDSMVVCWGHPDSDGGSEIINYIVER |
| | | RDKAGQRWIKCNKKTLTDLRYKVSGLTEGHEYEFRIMAENAAGISAPSPTSPFYKACDTV |
| | | FKPGPPGNPRVLDTSRSSISIAWNKPIYDGGSEITGYMVEIALPEEDEWQIVTPPAGLKA |
| | | TSYIITGLTENQEYKIRIYAMNSEGLGEPALVPGTPKAEDRMLPPEIELDADLRKVVTIR |
| | | ACCTLRLFVPIKGRPAPEVKWARDHGESLDKASIESTSSYTLLIVGNVNRFDSGKYILTV |
| | | ENSSGSKSAFVNVRVLDTPGPPQDLKVKEVTKTSVTLTWDPPLLDGGSKIKNYIVEKRES |
| | | TRKAYSTVATNCHKTSWKVDQLQEGCSYYFRVLAENEYGIGLPAETAESVKASERPLPPG |
| | | KITLMDVTRNSVSLSWEKPEHDGGSRILGYIVEMQTKGSDKWATCATVKVTEATITGLIQ |
| | | GEEYSFRVSAQNEKGISDPRQLSVPVIAKDLVIPPAPKLLFNTFTVLAGEDLKVDVPFIG |
| | | RPTPAVTWHKDNVPLKQTTRVNAESTENNSLLTIKDACREDVGHYVVKLTNSAGEAIETL |
| | | NVIVLDKPGPPTGPVKMDEVTADSITLSWGPPKYDGGSSINNYIVEKRDTSTTTWQIVSA |
| | | TVARTTIKACRLKTGCEYQFRIAAENRYGKSTYLNSEPTVAQYPFKVPGPPGTPVVTLSS |
| | | RDSMEVQWNEPISDGGSRVIGYHLERKERNSILWVKLNKTPIPQTKFKTTGLEEGVEYEF |
| | | RVSAENIVGIGKPSKVSECYVARDPCDPPGRPEAIIVTRNSVTLQWKKPTYDGGSKITGY |
| | | IVEKKELPEGRWMKASFTNIIDTHFEVTGLVEDHRYEFRVIARNAAGVPSEPSESTGAIT |
| | | ARDEVDPPRISMDPKYKDTIVVHAGESFKVDADIYGKPIPTIQWIKGDQELSNTARLEIK |
| | | STDFATSLSVKDAVRVDSGNYILKAKNVAGERSVTVNVKVLDRPGPPEGPVVISGVTAEK |
| | | CTLAWKPPLQDGGSDIINYIVERRETSRLVWTVVDANVQTLSCKVTKLLEGNEYTFRIMA |
| | | VNKYGVGEPLESEPVVAKNPFVVPDAPKAPEVTTVTKDSMIVVWERPASDGGSEILGYVL |
| | | EKRDKEGIRWTRCHKRLIGELRLRVTGLIENHDYEFRVSAENAAGLSEPSPPSAYQKACD |
| | | PIYKPGPPNNPKVIDITRSSVFLSWSKPIYDGGCEIQGYIVEKCDVSVGEWTMCTPPTGI |
| | | NKTNIEVEKLLEKHEYNFRICAINKAGVGEHADVPGPIIVEEKLEAPDIDLDLELRKIIN |
| | | IRAGGSLRLFVPIKGRPTPEVKWGKVDGEIRDAAIIDVTSSFTSLVLDNVNRYDSGKYTL |
| | | TLENSSGTKSAFVTVRVLDTPSPPVNLKVTEITKDSVSITWEPPLLDGGSKIKNYIVEKR |
| | | EATRKSYAAVVTNCHKNSWKIDQLQEGCSYYFRVTAENEYGIGLPAQTADPIKVAEVPQP |
| | | PGKITVDDVTRNSVSLSWTKPEHDGGSKIIQYIVEMQAKHSEKWSECARVKSLQAVITNL |
| | | TQGEEYLFRVVAVNEKGRSDPRSLAVPIVAKDLVIEPDVKPAFSSYSVQVGQDLKIEVPI |
| | | SGRPKPTITWTKDGLPLKQTTRINVTDSLDLTTLSIKETHKDDGGQYGITVANVVGQKTA |
| | | SIEIVTLDKPDPPKGPVKFDDVSAESITLSWNPPLYTGGCQITNYIVQKRDTTTTVWDVV |
| | | SATVARTTLKVTKLKTGTEYQFRIFAENRYGQSFALESDPIVAQYPYKEPGPPGTPFATA |
| | | ISKDSMVIQWHEPVNNGGSPVIGYHLERKERNSILWTKVNKTIIHDTQFKAQNLEEGIEY |
| | | EFRVYAENIVGVGKASKNSECYVARDPCDPPGTPEPIMVKRNEITLQWTKPVYDGGSMIT |
| | | GYIVEKRDLPDGRWMKASFTNVIETQPTVSGLTEDQRYEFRVIAKNAAGAISKPSDSTGP |
| | | ITAKDEVELPRISMDPKFRDTIVVNAGETFRLEADVHGKPLPTIEWLRGDKEIEESARCE |
| | | IKNTDFKALLIVKDAIRIDGGQYILRASNVAGSKSFPVNVKVLDRPGPPPEGPVQVTGVTS |
| | | EKCSLTWSPPLQDGGSDISHYVVEKRETSRLAWTVVASEVVTNSLKVTKLLEGNEYVFRI |
| | | MAVNKYGVGEPLESAPVLMKNPFVLPGPPKSLEVTNIAKDSMTVCWNRRDSDGGSEIIGY |
| | | IVEKRDRSGIRWIKCNDRRITDLRLRVTGLTEDHEYEFRVSAENAAGVGEPSPATVYYKA |
| | | CDPVFKPGPPTNAHIVDTTKNSITLAWGKPIYDGGSEILGYVVEICKADEEEWQIVTPQT |
| | | GLRVTRFEISKLTEHQEYKIRVCALNKVGLGEATSVPGTVKPEDKLEAPELDLDSELRKG |
| | | IVVRAGGSARIHIPFKGRPTPEITWSREEGEPTDKVQIEKGVNYTQLSIDNCDRNDAGKY |
| | | ILKLENSSGSKSAFVTVKVLDTPGPPQNLAVKEVRKDSAFLVWEPPIIDGGAKVKNYVID |
| | | KRESTRKAYANVSSKCSKTSFKVENLTEGAIYYFRVMAENEFGVGVPVETVDAVKAAEPP |
| | | SPPGKVTLTDVSQTSASLMWEKPEHDGGSRVLGYVVEMQPKGTEKWSIVAESKVCNAVVT |
| | | GLSSGQEYQFRVKAYNEKGKSDPRVLGVPVIAKDLTIQPSLKLPFNTYSIQAGEDLKIEI |
| | | PVIGRPRPNISWVKDGEPLKQTTRVNVEETATSTVLHIKEGNKDDFGKYTVTATNSAGTA |
| | | TENLSVIVLEKPGPPVGPVRFDEVSADFVVISWEPPAYTGGCQISNYIVEKRDTTTTTWH |
| | | MVSATVARTTIKITKLKTGTEYQFRIFAENRYGKSAPLDSKAVIVQYPFKEPGPPGTPFV |
| | | TSISKDQMLVQWHEPVNDGGTKIIGYHLEQKEKNSILWVKLNKTPIQDTKFKTTGLDEGL |
| | | EYEFKVSAENIVGIGKPSKVSECFVARDPCDPPGRPEAIVITRNNVTLKWKKPAYDGGSK |
| | | ITGYIVEKKDLPDGRWMKASFTNVLETEFTVSGLVEDQRYEFRVIARNAAGNFSEPSDSS |
| | | GAITARDEIDAPNASLDPKYKDVIVVHAGETFVLEADIRGKPIPDVVWSKDGKELEETAA |
| | | RMEIKSTIQKTTLVVKDCIRTDGGQYILKLSNVGGTKSIPITVKVLDRPGPPEGPLKVTG |
| | | VTAEKCYLAWNPPLQDGGANISHYIIEKRETSRLSWTQVSTEVQALNYKVTKLLPGNEYI |
| | | FRVMAVNKYGIGEPLESGPVTACNPYKPPGPPSTPEVSAITKDSMVVTWARPVDDGGTEI |
| | | EGYILEKRDKEGVRWTKCNKKTLTDLRLRVTGLTEGHSYEFRVAAENAAGVGEPSEPSVF |
| | | YRACDALYPPGPPSNPKVTDTSRSSVSLAWSKPIYDGGAPVKGYVVEVKEAAADEWTTCT |
| | | PPTGLQGKQFTVTKLKENTEYNFRICAINSEGVGEPATLPGSVVAQERIEPPEIELDADL |
| | | RKVVVLRASATLRLFVTIKGRPEPEVKWEKAEGILTDRAQIEVTSSFTMLVIDNVTRFDS |
| | | GRYNLTLENNSGSKTAFVNVRVLDSPSAPVNLTIREVKKDSVTLSWEPPLIDGGAKITNY |
| | | IVEKRETTRKAYATTTNNCTKTTFRIENLQEGCSYYFRVLASNEYGIGLPAETTEPVKVS |
| | | EPPLPPGRVTLVDVTRNTATIKWEKPESDGGSKITGYVVEMQTKGSEKWSTCTQVKTLEA |
| | | TISGLTAGEEYVFRVAAVNEKGRSDPRQLGVPVIARDIEIKPSVELPFHTFNVKAREQLK |
| | | IDVPFKGRPQATVNWRKDGQTLKETTRVNVSSSKTVTSLSIKEASKEDVGTYELCVSNSA |
| | | GSITVPITIIVLDRPGPPGPIRIDEVSCDSITISWNPPEYDGGCQISNYIVEKKETTSTT |
| | | WHIVSQAVARTSIKIVRLTTGSEYQFRVCAENRYGKSSYSESSAVVAEYPFSPPGPPGTP |
| | | KVVHATKSTMLVTWQVPVNDGGSRVIGYHLEYKERSSILWSKANKILIADTQMKVSGLDE |
| | | GLMYEYRVYAENIAGIGKCSKSCEPVPARDPCDPPGQPEVTNITRKSVSLKWSKPHYDGG |
| | | AKITGYIVERRELPDGRWLKCNYTNIQETYPEVTELTEDQRYEPRVFARNAADSVSEPSE |
| | | STGPIIVKDDVEPPRVMMDVKFRDVIVVKAGEVLKINADIAGRPLPVISWAKDGIEIEER |
| | | ARTEIISTDNHTLLTVKDCIRRDTGQYVLTLKNVAGTRSVAVNCKVLDKPGPPAGPLEIN |
| | | GLTAEKCLSLWGRPQEDGGADIDYYIVEKRETSHLAWTICEGELQMTSCKVTKLLKGNEY |
| | | IFRVTGVNKYGVGEPLESVAIKALDPFTVPSPPTSLEITSVTKESMTLCWSRPESDGGSE |
| | | ISGYIIERREKNSLRWVRVNKKPVYDLRVKSTGLREGCEYEYRVYAENAAGLSLPSETSP |
| | | [symbol] IRAEDPVFLPSPPSKPKIVDSGKTTITIAWVKPLFDGGAPITGYTVEYKKSDDTDWKTS |
| | | IQSLRGTEYTISGLTTGAEYVFRVKSVNKVGASDPSDSSDPQIAKEREEEPLFDIDSEMR |
| | | KTLIVKAGASFTMTVPFRGRPVPNVLWSKPDTDLRTRAYVDTTDSRTSLTIENANRNDSG |
| | | KYTLTIQNVLSAASLTLVVKVLDTPGPPTNITVQDVTKESAVLSWDVPENDGGAPVKNYH |
| | | IEKREASKKAWVSVTNNCNRLSYKVTNLEQGAIYYFRVSGENEFGVGIPAETKEGVKITE |
| | | KPSPPEKLGVTSISKDSVSLTWLKPEHDGGSRIVHYVVEALEKGQKNWVKCAVAKSTHHV |
| | | VSGLRENSEYFFRVFAENQAGLSDPRELLLPVLIKEQLEPPEIDMKNFPSHTVYVRAGSN |
| | | LKVDIPISGKPLPKVTLSRDGVPLKATMRFNTEITAENLTINLKESVTADAGRYEITAAN |
| | | SSGTTKAFINIVVLDRPGPPTGPVVISDITEESVTLKWEPPKYDGGSQVTNYILLKRETS |
| | | TAVWTEVSATVARTMMKVMKLTTGEEYQFRIKAENRFGISDHIDSACVTVKLPYTTPGPP |
| | | STPWVTNVIRESITVGWHEPVSNGGSAVVGYHLEMKDRNSILWQKANKLVIRTTHFKVTT |
| | | ISAGLIYEFRVYAENAAGVGKPSHPSEPVLAIDACEPPRNVRITDISKNSVSLSWQQPAF |
| | | DGGSKITGYIVERRDLPDGRWTKASFTNVTETQFIISGLTQNSQYEFRVFARNAVGSISN |
| | | PSEVVGPITCIDSYGGPVIDLPLEYTEVVKYRAGISVKLRAGISGKPAPTIEWYKDDKEL |
| | | QTNALVCVENTTDLASILIKDADRLNSGCYELKLRNAMGSASATIRVQILDKPGPPGGPI |
| | | EFKTVTAEKITLLWRPPADDGGAKITHYIVEKRETSRVVWSMVSEHLEECIITTTKIIKG |
| | | NEYIFRVRAVNKYGIGEPLESDSVVAKNAFVTPGPPGIPEVTKITKNSMTVVWSRPIADG |
| | | GSDISGYFLEKRDKKSLGWFKVLKETIRDTRQKVTGLTENSDYQYRVCAVNAAGQGPFSE |
| | | PSEFYKAADPIDPPGPPAKIRIADSTKSSITLGWSKPVYDGGSAVTGYVVEIRQGEEEEW |
| | | TTVSTKGEVRTTEYVVSNLKPGVNYYFRVSAVNCAGQGEPIEMNEPVQAKDILEAPEIDL |
| | | DVALKTSVIAKAGEDVQVLIPFKGRPPPTVTWRKDEKNLGSDARYSIENTDSSSLLTIPQ |
| | | VTRNDTGKYILTIENGVGEPKSSTVSVKVLDTPAACQKLQVKHVSRGTVILLWDPPLIDG |
| | | GSPIINYVIEKRDATKRTWSVVSHKCSSTSFKLIDLSEKTPFFFRVLAENEIGIGEPCET |
| | | TEPVKAAEVPAPIRDLSMKDSTKTSVILSWTKPDFDGGSVITEYVVERKGKGEQTWSHAG |
| | | ISKTCEIEVSQLKEQSVLEFRVFAKNEKGLSDPVITGPITVKELIITPEVDLSDIPGAQV |
| | | TVRIGHNVHLELPYKGKPKPSISWLKDGLPLKESEFVRFSKTENKITLSIKNAKKEHGGK |
| | | YTVILDNAVCRIAVPITVITLGPPSKFKGPIRFDEIKADSVILSWDVPEDNGGGEHCYS |
| | | IEKRETSQTNWKMVCSSVARTTFKVPNLVKDAEYQFRVRAENRYGVSQPLVSSIIVAKHQ |
| | | FRIPGPPGKPVIYNVISDGMSLTWDAPVYDGGSEVTGFHVEKKERNSILWQKVNTSPISG |
| | | REYRATGLVEGLDYQFRVYAENSAGLSSPSDPSKFTLAVSPVDPPGTPDYIDVTRETITL |
| | | KWNPPLRDGGSKIVGYSIEKRQGNERWVRCNFTDVSECQYTVTGLSPGDRYEFRIIARNA |
| | | VGTISPPSQSSGIIMIRDENVPPIVEFGPEYFDGLIIKSGESLRIKALVQGRPVPRVTWF |
| | | KDGVEIEKRMNMEITDVLGSTSLFVRDATRDHRGVYTVEAKNASGSAKAEIKVKVQDTPG |
| | | KVVGPIRFTNITGEKMTLWWDAPLNDGCAPITHYIIEKRETSRLAWALIEDKCEAQSYTA |
| | | IKLINGNEYQFRVSAVNKFGVGRPLDSDPVVAQIQYTVPDAPGIPEPSNITGNSITLTWA |
| | | RPESDGGSEIQQYILERREKKSTRWVKVISKRPISETRFKVTGLTEGNEYEFHVMAENAA |
| | | GVGPASGISRLIKCREPVNPPGPPTVVKVTDTSKTTVSLEWSKPVFDGGMEIIGYIIEMC |
| | | KADLGDWHKVNAEACVKTRYTVTDLQAGEEYKFRVSAINGAGKGDSCEVTGTIKAVDRLT |
| | | APELDIDANFKQTHVVRAGASIRLFIAYQGRPTPTAVWSKPDSNLSLRADIHTTDSFSTL |
| | | TVENCNRNDAGKYTLTVENNSGSKSITFTVKVLDTPGPPGPITFKDVTRGSATLMWDAPL |
| | | LDGGARIHHYVVEKREASRRSWQVISEKCTRQIFKVNDLAEGVPYYFRVSAVNEYGVGEP |
| | | YEMPEPIVATEQPAPPRRLDVVDTSKSSAVLAWLKPDHDGGSRITGYLLEMRQKGSDFWV |
| | | EAGHTKQLTFTVERLVEKTEYEFRVKAKNDAGYSEPREAFSSVIIKEPQIEPTADLTGIT |
| | | NQLITCKAGSPFTIDVPISGRPAPKVTWKLEEMRLKETDRVSITTTKDRTTLTVKDSMRG |
| | | DSGRYFLTLENTAGVKTPSVTVVVIGRPGPVTGPIEVSSVSAESCVLSWGEPKDGGGTEI |
| | | TNYIVEKRESGTTAWQLVNSSVKRTQIKVTHLTKYMEYSFRVSSENRFGVSKPLESAPII |
| | | AEHPFVPPSAPTRPEVYHVSANAMSIRWEEPYHDGGSKIIGYWVEKKERNTILWVKENKV |
| | | PCLECNYKVTGLVEGLEYQFRTYALNAAGVSKASEASRPIMAQNPVDAPGRPEVTDVTRS |
| | | TVSLIWSAPAYDGGSKVVGYIIERKPVSEVGDGRWLKCNYTIVSDNFFTVTALSEGDTYE |
| | | FRVLAKNAAGVISKGSESTGPVTCRDEYAPPKAELDARLHGDLVTIRAGSDLVLDAAVGG |
| | | KPEPKIIWTKGDKELDLCEKVSLQYTGKRATAVIKFCDRSDSGKYTLTVKNASGTKAVSV |
| | | MVKVLDSPGPCGKLTVSRVTQEKCTLAWSLPQEDGGAEHHYIVERRETSRLNWVIVEGE |
| | | CPTLSYVVTRLIKNNEYIFRVRAVNKYGPGVPVESEPIVARNSFTIPSPPGIPEEVGTGK |
| | | EHIIIQWTKPESDGGNEISNYLVDKREKKSLRWTRVNKDYVVYDTRLKVTSLMEGCDYQF |
| | | RVTAVNAAGNSEPSEASNFISCREPSYTPGPPSAPRVVDTTKHSISLAWTKPMYDGGTDI |
| | | VGYVLEMQEKDTDQWYRVHTNATIRNTEFTVPDLKMGQKYSFRVAAVNVKGMSEYSESIA |
| | | EIEPVERIEIPDLELADDLKKTVTIRAGASLRLMVSVSGRPPPVITWSKQGIDLASRAII |
| | | DTTESYSLLIVDKVNRYDAGKYTIEAENQSGKKSATVLVKVYDTPGPCPSVKVKEVSRDS |
| | | VTHWEIPTIDGGAPVNNYIVEKREAAMRAFKTVTTKCSKTLYRISGLVEGTMYYFRVLP |
| | | ENIYGIGEPCETSDAVLVSEVPLVPAKLEVVDVTKSTVTLAWEKPLYDGGSRLTGYVLEA |
| | | CKAGTERWMKVVTLKPTVLEHTVISLNEGEQYLFRIRAQNEKGVSEPRETVTAVTVQDLR |
| | | VLPTIDLSTMPQKTIHVPAGRPVELVIPIAGRPPPAASWFFAGSKLRESERVTVETHTKV |
| | | AKLTIRETTIRDTGEYTLELKNVTGTTSETIKVIILDKPGPPTGPIKIDEIDATSITISW |
| | | EPPELDGGAPLSGYVVEQRDAHRPGWLPVSESVTRSTFKFTRLTEGNEYYFRVAATNRFG |
| | | IGSYLQSEVIECRSSIRIPGPPETLQIFDVSRDGMTLTWYPPEDDGGSQVTGYIVERKEV |
| | | RADRWVRVNKVPVTMTRYRSTGLTEGLEYEHRVTAINARGSGKPSRPSKPIVAMDPIAPP |
| | | GKPQNPRVTDTTRTSVSLAWSVPEDEGGSKVTGYLIEMQKVDQHEWTKCNTTPTKIREYT |
| | | LTHLPQGAEYRFRVLACNAGGPGEPAEVPGTVKVTEMLEYPDYELDERYQEGIFVRQGGV |
| | | IRLTIPIKGKPFPICKWTKEGQDISKRAMIATSETHTELVIKEADRGDSGTYDLVLENKC |
| | | GKKAVYIKVRVIGSPNSPEGPLEYDDIQVRSVRVSWRPPADDGGADILGYILERREVPKA |
| | | AWYTIDSRVRGTSLVVKGLKENVEYHFRVSAENQFGISKPLKSEEPVTPKTPLNPPEPPS |
| | | NPPEVLDVTKSSVSLSWSRPKDDGGSRVTGYYIERKETSTDKWVRHNKTQITTIMYTVTG |
| | | LVPDAEYQFRIIAQNDVGLSETSPASEPVVCKDPFDKPSQPGELEILSISKDSVTLQWEK |
| | | PECDGGKEILGYWVEYRQSGDSAWKKSNKERIKDKQFTIGGLLEATEYEFRVFAENETGL |
| | | SRPRRTAMSIKTKLTSGEAPGIRKEMKDVTTKLGEAAQLSCQIVGRFLPDIKWYRFGKEL |
| | | IQSRKYKMSSDGRTHTLTVMTEEQEDEGVYTCIATNEVGEVETSSKLLQATPQFHPGYP |
| | | LKEKYYGAVGSTLRLHVMYIGRPVPAMTWPHGQKLLQNSENITIENTPHYTHLVMKNVQR |
| | | KTHAGKYKVQLSNVFGTVDAILDVEIQDKPDKPTGPIVIEALLKNSAVISWKPPADDGGS |
| | | WTTNYVVEKCEAKEGAEWQLVSSAISVTTCRIVNLTENAGYYFRVSAQNTFGISDPLEVS |
| | | SVVIIKSPFEKPGAPGKPTTTAVTKDSCVVAWKPPASDGGAKIRNYYLEKREKKQNKWIS |
| | | VTTEEIRETVFSVKNLIEGLEYEFRVKCENLGGESEWSEISEPITPKSDVPIQAPHFKEE |
| | | LRNLNVRYQSNATLVCKVTGHPKPIVKWYRQGKEIIADGLKYRIQEFKGGYHQLIIASVT |
| | | DDDATVYQVRATNQGGSVSGTASLEVEVPAKIHLPKTLEGMGAVHALRGEVVSIKIPFSG |
| | | KPDPVITWQKGQDLIDNNGHYQVIVTRSFTSLVFPNGVERKDAGFYVVCAKNRFGIDQKT |
| | | VELDVADVPDFPRGVKVSDVSRDSVNLTWTEPASDGGSKHNYIVEKCATTAERWLRVGQ |
| | | ARETRYTVINLPGKTSYQFRVIAENKFGLSKPSEPSEPTITKEDKTRAMNYDEEVDETRE |
| | | VSMTKASHSSTKELYEKYMIAEDLGRGEFGIVHRCVETSSKKTYMAKFVKVKGTDQVLVK |
| | | KEISILNIARHKNILHLHESPESMEELVMIFEFISGLDIFERINTSAFELNEREIVSYVH |
| | | QVCEALQFLHSHNIGHFDIRPENIIYQTRRSSTTK [symbol] EFGQARQLKPGDNFRLLFTAPEY |
| | | YAPEVHQHDVVSTATDMWSLGTLVYVLLSGINPFLAETNQQIIENIMNAEYTFDEEAPKE |
| | | ISIEAMDFVDRLLVKERKSRMTASEALQHPWLKQKIERVSTKVIRTLKHRRYYHTLIKKD |
| | | LNMVVSAARISCGGAIRSQKGVSVAKVKVASIEIGPVSGQIMHAVGEEGGHVKYVCKIEN |
| | | YDQSTQVTWYFGVRQLENSEKYEITYEDGVAILYVKDITKLDDGTYRCKVVNDYGEDSSY |
| | | AELFVKGVREVYDYYCRRTMKKIKRRTDTMRLLERPPEFTLPLYNKTAYVGENVRFGVTI |
| | | TVHPEPHVTWYESGQKIKPGDNDKKYTFESDKGLYQLTINSVTTDDDAEYTVVARNKYGE |
| | | DSCKAKLTVTLHPPPTDSTLRPMPKRILANAECQEGQSVCFEIRVSGIPPPTLKWEKDGQ |
| | | PLSLGPNI [symbol] GLDYYALHIRDTLPEDTGYYRVTATNTAGSTSDQAHLQVERLRYKKQ |
| | | EFKSKEEHERHVQKQIDKTLRMAEILSGTESVPLTQVAKEALREAAVLYKPAVSTKTVKG |
| | | EFRLEIEEKKEERKLRMPYDVPEPRKYKQT [symbol] EEDQRIKQFVPMSDMKWYKKIRDQYEMP |
| | | GKLDRVVQKRPKRIRLSRWEQFYVMFLPRITDQYRPKWRIPKLSQDDLEIVRPARRRTPS |
| | | PDYDFYYRPRRRSLGD [symbol] DEELLLPIDDYLAMKRTEPERLRLEEPLELG [symbol] SASPPSRSPP |
| | | HFELSSLRYSSPQAHVKVEETRKDFRYSTYHIPTKAEASTSYAELRERHAQAAYRQPKQR |
| | | QRIMAEREDEELLRPVTTTQHLSEYKSELDFMSKEEKSRKKSRRQREVTEITEIE [symbol] YEI |
| | | SKHAQRESSSSASRLLRRRRSLSPTYIELMRPVSELIRSRPQPAEEYEDDTERRSPIPER |
| | | TRPRSPSPVSSERSLSRPERSARFDIFSRYESMKAALKTQKTSERKYEVLSQQPFTLDHA |
| | | PRITLRMRSHRVPCGQNTRFILNVQSKPTAEVKWYHNGVELQESSKIHYTNTSGVLTLEI |
| | | LDCHTDDSGTYRAVCTNYKGEASDYATLDVTGGDYITYASQRRDEEVPRSVFPELTRTEA |
| | | YAVSSPKKTSEMEASSSVREVKSQMTETRESLSSYEHSASAEMESAALEEKSLEEKSTTR |
| | | KIKTTLAARILTKPRSMTVYEGESARFSCDTDGEPVPTVTWLRKGQVLSTSARHQVTTTK |
| | | YKSTFEISSVQASDEGNYSVVVENSEGKQEAEFTLTIQKARVTEKAVTSPPRVKSPEPRV |
| | | KSPEAVKSPKRVKSPEPSHPKAVSPTETKPTPTEKVQHLPVSAPPKITQFLKAEASKEIA |
| | | KLTCVVESSVLRAKEVTWYKDGKKLKENGHFQFHYSADGTYELKINNLTESDQGEYVCEI |
| | | SGEGGTSKTNLQFMGQAFKSIHEKVSKISETKKSDQKTTESTVTRKTEPKAPEPISSKPV |
| | | IVTGLQDTTVSSDSVAKPAVKATGEPRPTAIWTKDGKAITQGGKYKLSEDKGGFFLEIHK |
| | | TDTSDSGLYTCTVKNSAGSVSSSCKLTIKAIKDTEAQKVSTQKTSEITPQKKAVVQEEIS |
| | | QKALRSEEIKMSEAKSQEKLALKEEASKVLISEEVKKSAATSLEKSIVHEEITKTSQASE |
| | | EVRTHAEIKAFSTQMSINEGQRLVLKANIAGATDVKWVLNGVELTNSEEYRYGVSGSDQT |
| | | LTIKQASHRDEGILTCISKTKEGIVKCQYDLTLSKELSDAPAPISQPRSQNINEGQNVLF |
| | | TCEISGEPSPEIEWFKNNLPISISSNVSISRSRNVYSLEIRNASVSDSGKYTIKAKNFRG |
| | | QCSATASLMVLPLVEEPSREVVLRTSGDTSLQGSPSSQSVQMSASKQEASFSSFSSSSAS |
| | | SMTEMKFASMSAQSMSSMQESFVEMSSSSFMGISNMTQLESSTSKMLKAGIRGIPPKIEA |
| | | LPSDISIDEGKVLTVACAFTGEPTPEVTWSCGGRKIHSQEQGRPHIENTDDLTILIIMDV |
| | | QKQDGGLYTLSLGNEPGSDSATVNIHIRSI |
| 41 | Serine-protein kinase ATM | MSLVLNDLLICCRQLEHDRATERKKEVEKFKRLIRDPETIKHLDRHSDSKQGKYLNWDAV |
| | (ATM) | FRPLQKYIQKETECLRIAKPNVSASTQASRQKKMQEISSLVKYFIKCANRRAPRLKCQEL |
| | | LNYIMDTVKDSSNGAIYGADCSNILLKDILSVRKYWCEISQQQWLELFSVYPRLYLKPSQ |
| | | DVHRVLVARIIHAVTKGCCSQTDGLNSKFLDFFSKAIQCARQEKSSSGLNHILAALTIFL |
| | | KTIAVNFRIRVCELGDEILPTLLYIWTQHRLNDSLKEVIIELFQLQIYIHHPKGAKTQEK |
| | | GAYESTKWRSILYNLYDLLVNEISHIGSRGKYSSGFRNIAVKENLIELMADICHQVFNED |
| | | TRSLEISQSYTTTQRESSDYSVPCKRKKIELGWEVIKDHLQKSQNDFDLVPWLQIATQLI |
| | | SKYPASLPNCELSPLLMILSQLLPQQRHGERTPYVLRCLTEVALCQDKRSNLESSQKSDL |
| | | LKLWNKIWCITFRGISSEQIQAENFGLLGAIIQGSLVEVDREFWKLFTGSACRPSCPAVC |
| | | CLTLALTTSIVPGTVKMGIPQNMCEVNRSPSLKPSIMKWLLPYQLPGDLPNSTEVPPILH |
| | | SNFPHLVLEKILVSLTMKNCKAAMNFPQSVPECEHHQKDKEELSFSEVEELFLQTTFDKM |
| | | DFLTIVRECGIFKHQSSIGFSVHQNLKESLDRCLLGLSEQLLNNYSS [symbol] TTNSETLVRCSR |
| | | LLVGVLGCYCYMGVIAEEEAYKSELFQKAKSLMQCAGESITLFKNKTNEEFRIGSLRNMM |
| | | QLCTRCLSNCTKKSPNKIASGFFLRLLTSKLMNDIADICKSLASFIKKPFDRGEVESMED |
| | | DTNGNLMEVEDQSSMNLFNDYPDSSVSDANEPGESQSTIGAINPLAEEYLSKQDLLPLDM |
| | | LKPLCLCVTTAQTNTVSFRAADIRRKLLMLIDSSTLEPTKSLHLHMYLMLLKELPGEEYP |
| | | LPMEDVLPLLKPLSNVCSLYRRDQDVCKTILNHVLHVVKNLGQSNMDSENTRDAQGQFLT |
| | | VIGAFWHLTKERKYIFSVRMALVNCLKTLLEADPYSKWAILNVMGKDFPVNEVFTQFLAD |
| | | NHHQVRMLAAESINRLFQDTKGDSSRLLKALPLKLQQTAFENAYLKAQEGMREMSHSAEN |
| | | PETLDEIYNRKSVLLTLIAVVLSCSPICEKQALFALCKSVKENGLEPHLVKKVLEKVSET |
| | | PGYRRKEDFMASHLDYLVLEWLNLQDTEYNLSSPPFILLNYTNIEDFYRSCYKVLIPHLV |
| | | IRSHFDEVKSIANQIQEDWKSLLTDCFPKILVNILPYPAYEGTRDSGMAQQRETATKVYD |
| | | MLKSENLLGKQIDHLFISNLPHVVELLMTLHEPANSSASQSTDLCDFSGDLDPAPNPPH |
| | | FPSHVIKATFAYISNCHKTKLKSILHLSKSPDSYQKILLAICEQAAETNNVYKKHRILK |
| | | IYHLFVSLLLKDIKSGLGGAWAFVLRDVIYTLIHYINQRPSCIMDVSLRSFSLCCDLLSQ |
| | | VCQTAVTYCKDALENHLHVIVGTLIPLVYEQVEVQKQVLDLLKYLVIDNKDNENLYITIK |
| | | LLDPFPDHVVFKDLRITQQKIKYSRGPFSLLEEINHFLSVSVYDALPLTRLEGLKDLRRQ |
| | | LELHKDQMVDIMRASQDNPQDGIMVKLVVNLLQLSKMAINHTGEKEVLEAVGSCLGEVGP |
| | | IDFSTIAIQHSKDASYTRALKLFEDKELQWTPIMLTYLNNTLVEDCVKVRSAAVTCLKNI |
| | | LATKTGHSFWEIYKMTTDPMLAYLQPFRTSRKKFLEVPRFDKENPFEGLDDINLWIPLSE |
| | | NHDIWIKTLTCAFLDSGGTKCEILQLLKPMCEVKTDFCQTVLPYLIHDILLQDTNESWRN |
| | | LLSTHVQGFFTSCLRHFSQTSRSTTPANLDSESEHFFRCCLDKKSQRTMLAVVDYMRRQK |
| | | RPSSGTIFNDAFWLDLNYLEVAKVAQSCAAHFTALLYAEIYADKKSMDDQEKRSLAFEEG |
| | | SQNTTISSLSEKSKEETGISLQDLILEIYRSIGEPDSLYGCGGGKMLQPITRLRTYEHEA |
| | | MWGKALVTYDLETAIPSSTRQAGIIQALQNLGLCHILSVYLKGLDYENKDWCPELEPLHY |
| | | QAAWRNMQWDHCTSVSKEVEGTSYHESLYNALQSLRDREFSTFYESLKYARVKEVEEMCK |
| | | RSLESVYSLYPTLSRLQAIGELESIGELFSRSVTHRQLSEVYIKWQKHSQLLKDSDPSFQ |
| | | EPIMALRTVILEILMEKEMDNSQRECIKDILTKHLVELSILARTFKNTQLPEPAIFQIKQ |
| | | YNSVSCGVSEWQLEEAQVFWAKKEQSLALSILKQMIKKLDASCAANNPSLKLTYTECLRY |
| | | CGNWLAETCLENPAVIMQTYLEKAVEVAGNYDGESSDELRNGKMKAFLSLARFSDTQYQR |
| | | IENYMKSSEFENKQALLKRAKEEVGLLREHKIQTNRYTVKVQREL [symbol] DELALRALKEDRK |
| | | RFLCKAVENYINCLLSGEEHDMWVFRLCSLWIENSGVSEVNGMMKRDGMKIPTYKPLPLM |
| | | YQLAARMGTKMMGGLGFHEVLNNLISRISMDHPHHTLFILALANANRDEFLTKPEVARR |
| | | SRITKNVPKQSSQLDEDRTEAANRIICTIRSRRPQMVRSVEALCDAYIILANLDATQWKT |
| | | QRKGINIPADQPITKLKNLEDVVVPTMEIKVDHTGEYGNLVTIQSPKAEFRLAGGVNLPK |
| | | IIDCVGSDGKERRQLVKGRDDLRQDAVMQQVFQMCNTLLQRNTETRKRKLTICTYKVVPL |
| | | SQRSGVLEWCTGTVPIGEFLVNNEDGAHKRYRPNDFSAFQCQKKMMEVQKKSFEEKYEVF |
| | | MDVCQNPQPVFRYFCMEKFLDPAIWFEKRLAYTRSVATSSIVGYILGLGDRHVQNILINE |
| | | QSAELVHIDLGVAFEQGKILPTPETVPFRLTRDIVDGMGITGVEGVFRRCCEKTMEVMRN |
| | | SQETLLTIVEVLLYDPLFDWTMNPLKALYLQQRPEDETELHPTLNADDQECKRNLSDIDQ |
| | | SFNKVAERVLMRLQEKLKGVEEGTVLSVGGQVNLLIQQAIDPKNLSRLFPGWKAWV |
| 42 | Myeloperoxidase (MPO) | MGVPFFSSLRCMVDLGPCWAGGLTAEMKLLLALAGLLAILATPQPSEGAAPAVLGEVDTS |
| | | LVLSSMEEAKQLVDKAYKERRESIKQRLRSGSASPMELLSYFKQPVAATRTAVRAADYLH |
| | | VALDLLERKLRSLWRRPFNVTDVLTPAQLNVLSKSSGCAYQDVGVTCPEQDKYRTTTGMC |
| | | NNRRSPTLGASNRAFVRWLPAEYEDGFSLPYGWTPGVKRNGFPVALARAVSNEIVRFPTD |
| | | QLTPDQERSLMFMQWGQLLDHDLDFTPEPAARASFVTGVNCETSCVQQPPCFPLKIPPND |
| | | PRIKNQADCIPFFRSCPACPGNTTIRNQINALTSFVDASMVYGSEEPLARNLRNMSNQL |
| | | GLLAVNQRFQDNGRALLPFDNLHDDPCLLTNRSARIPCFLAGDTRSSEMPELTSMHTLLL |
| | | REHNRLATELKSLNPRWDGERLYQEARKIVGAMVQHTYRDYLPLVLGPTAMRKYLPTYR |
| | | SYNDSVDPRIANVFTNAFRYGHTLIQPFMFRLDNRYQPMEPNPRVPLSRVFFASWRVVLE |
| | | GGIDPILRGLMATPAKLNRQNQIAVDEIRERLFEQVMRIGLDLPALNMQRSRDHGLPGYN |
| | | AWRRFCGLPQPETVGQLGTVLRNLKLARKLMEQYGTPNNIDIWMGGVSEPLKRKGRVGPL |
| | | LACHGTQFRKLRDGDFWWENEGVFSMQQRQALAQISLPRIICDNTGITTVSKNNIFMS |
| | | NSYPRDFVNCSTLPALNLASWREAS |
| 43 | Xanthine | MTADKLVFFVNGRKVVEKNADPETTLLAYLRRKLGLSGTKLGCGEGGCGACTVMLSKYDR |
| | dehydrogenase/oxidase | LQNKIVHFSANACLAPICSLHHVAVTTVEGIGSTKTRLHPVQERIAKSHGSQCGFCTPGI |
| | (XDH) | VMSMYTLLRNQPEPTMEEIENAFQGNLCRCTGYRPILQGFRTFARDGGCCGGDGNNPNCC |
| | | MNQKKDHSVSLSPSLFKPEEFTPLDPTQEPIPPPELLRLKDTPRKQLRFEGERVTWIQAS |
| | | TLKELLDLKAQHPDAKLVVGNTEIGIEMKFKNMLFPMIVCPAWIPELNSVEHGPDGISFG |
| | | AACPLSIVEKTLVDAVAKLPAQKTEVFRGVLEQLRWFAGKQVKSVASVGGNITTASPLSD |
| | | LNPVFMASGAKLTLVSRGTRRTVQMDHTFFPGYRKTLLSPEEILLSIEIPYSREGEYFSA |
| | | FKQASRREDDIAKVTSGMRVLFKPGTTEVQELALCYGGMANRTISALKTTQRQLSKLWKE |
| | | ELLQDVCAGLAEELHLPPDAPGGMVDFRCTLTLSFFFKFYLTVLQKLGQENLEDKCGKLD |
| | | PTFASATLLFQKDPPADVQLFQEVPKGQSEEDMVGRPLPHLAADMQASGEAVYCDDIPRY |
| | | ENELSLRLVTSTRAHAKIKSIDTSEAKKVPGFVCFISADDVPGSNITGICNDETVFAKDK |
| | | VTCVGHIIGAVVADTPEHTQRAAQGVKITYEELPAIITIEDAIKNNSFYGPELKIEKGDL |
| | | KKGFSEADNVVSGEIYIGGQEHFYLETHCTIAVPKGEAGEMELFVSTQNTMKTQSFVAKM |
| | | LGVPANRIVVRVKRMGGGFGGKETRSTVVSTAVALAAYKTGRPVRCMLDRDEDMLTTGGR |
| | | HPFLARYKVGFMKTGTVVALEVDHFSNVGNTQDLSQSIMERALFHMDNCYKIPNIRGTGR |
| | | LCKTNLPSNTAFRGFGGPQGMLIAECWMSEVAVTCGMPAEEVRRKNLYKEGDLTHFNQKL |
| | | EGFTLPRCWEECLASSQYHARKSEVDKFNKENCWKKRGLCIIPTKFGISFTVPFLNQAGA |
| | | LLHVYTDGSVLLTHGGTEMGQGLHTKMVQVASRALKIPTSKIYISETSTNTVPNTSPTAA |
| | | SVSADLNGQAVYAACQTILKRLEPYKKKNPSGSWEDWVTAAYMDTVSLSATGFYRTPNLG |
| | | YSFETNSGNPFHYFSYGVACSEVEIDCLTGDHKNLRTDIVMDVGSSLNPAIDIGQVEGAF |
| | | VQGLGLFTLEELHYSPEGSLHTRGPSTYKIPAFGSIPIEFRVSLLRDCPNKKAIYASKAV |
| | | GEPPLFLAASIFFAIKDAIRAARAQHTGNNVKELFRLDSPATPEKIRNACVDKFTTLCVT |
| | | GVPENCKPWSVRV |
| 44 | DNA-dependent protein | MAGSGAGVRCSLLRLQETLSAADRCGAALAGHQLIRGLGQECVLSSSPAVLALQTSLVFS |
| | kinase catalytic subunit | RDFGLLVFVRKSLNSIEFRECREEILKFLCIFLEKMGQKIAPYSVEIKNTCTSVYTKDRA |
| | (PRKDC) | AKCKIPALDLLIKLLQTFRSSRLMDEFKIGELFSKFYGELALKKKKIPDTVLEKVYELLGL |
| | | LGEVHPSEMINNAENLFRAFLGELKTQMTSAVREPKLPVLAGCLKGLSSLLCNFTKSMEE |
| | | DPQTSREIFNFVLKAIRPQIDLKRYAVPSAGLRLFALHASQFSTCLLDNYVSLFEVLLKW |
| | | CAHTNVELKKAALSALESPLKQVSNMVAKNAEMHKNKLQYFMEQFYGIIRNVDSNNKELS |
| | | IAIRGYGLFAGPCKVINAKDVDFMYVELIQRCKQMFLTQTDTGDDRVYQMPSFLQSVASV |
| | | LLYLDTVPEVYTPVLEHLVVMQIDSFPQYSPKMQLVCCRAIVKVFLALAAKGPVLRNCIS |
| | | TVVHQGLIRICSKPVVLPKGPESESEDHRASGEVRTGKWKVPTYKDYVDLFRHLLSSDQM |
| | | MDSILADEAFPSVNSSSESLNHLLYDEFVKSVLKIVEKLDLTLEIQTVGEQENGDEAPGV |
| | | WMIPTSDPAANLHPAKPKDFSAFINLVEFCREILPEKQAEFFEPWVYSFSYELILQSTRL |
| | | PLISGFYKLLSITVRNAKKIKYFEGVSPKSLKHSPEDPEKYSCFALFVKFGKEVAVKMKQ |
| | | YKDELLASCLTFLLSLPHNIIELDVRAYVPALQMAFKLGLSYTPLAEVGLNALEEWSIYI |
| | | DRHVMQPYYKDILPCLDGYLKTSALSDETKNNWEVSALSRAAQKGFNKVVLKHLKKTKNL |
| | | SSNEAISLEEIRIRVVQMLGSLGGQINKNLLTVTSSDEMMKSYVAWDREKRLSFAVPFRE |
| | | MKPVIFLDVFLPRVTELALTASDRQTKVAACELLHSMVMFMLGKATQMPEGGQGAPPMYQ |
| | | LYKRTFPVLLRLACDVDQVTRQLYEPLVMQLIHWFTNNKKFESQDTVALLEAILDGIVDP |
| | | VDSTLRDFCGRCIREFLKWSIKQHPQQQEKSPVNTKSLFKRLYSLALHPNAFKRLGASL |
| | | AFNNIYREFREEESLVEQFVFEALVIYMESLALAHADEKSLGTIQQCCDAIDHLCRIIEK |
| | | KHVSLNKAKKRRLPRGFPPSASLCLLDLVKWLLAHCGRPQTECRHKSIELFYKFVPLLPG |
| | | NRSPNLWLKDVLKEEGVSFLINTFEGGGCGQPSGILAQPTLLYLRGPFSLQATLCWLDLL |
| | | LAALECYNTFIGERTVGALQVLGTEAQSSLLKAVAFFLESIAMHDIIAAEKCFGTGAAGN |
| | | RTSPQEGERYNYSKCTVVVRIMEFTTTLLNTSPEGWKLLKKDLCNTHLMRVLVQTLCEPA |
| | | SIGFNIGDVQVMAHLPDVCVNLMKALKMSPYKDILETHLREKITAQSIEELCAVNLYGPD |
| | | AQVDRSRLAAVVSACKQLHRAGLLHNILPSQSTDLHHSVGTELLSLVYKGIAPGDERQCL |
| | | PSLDLSCKQLASGLLELAFAFGGLCERLVSLLLNPAVLSTASLGSSQGSVIHFSHGEYFY |
| | | SLFSETINTELLKNLDLAVLELMQSSVDNTKMVSAVLNGMLDQSFRERANQKHQGLKLAT |
| | | TILQHWKKCDSWWAKDSPLETKMAVLALLAKILQIDSSVSFNTSHGSFPEVFTTYISLLA |
| | | DTKLDLHLKGQAVTLLPFFTSLTGGSLEELRRVLEQLIVAHFPMQSREFPPGTPRFNNYV |
| | | DCMKKFLDALELSQSPMLLELMTEVLCREQQHVMEELFQSSFRRIARRGSCVTQVGLLES |
| | | VYEMFRKDDFRLSFTRQSFVDRSLLTLLWHCSLDALREFFSTIVVDAIDVLKSRFTKLNE |
| | | STFDTQITKKMGYYKILDVMYSRLPKDDVHAKESKINQVFHGSCITEGNELTKTLIKLCY |
| | | DAFTENMAGENQLLERRRLYHCAAYNCAISVICCVFNELKFYQGFLFSEKPEKNLLIFEN |
| | | LIDLKRRYNFPVEVEVPMERKKKYIEIRKEAREAANGDSDGPSYMSSLSYLADSTLSEEM |
| | | SQFDFSTGVQSYSYSSQDPRPATGRFRRREQRDPTVHDDVLELEMDELNRHECMAPLTAL |
| | | VKHMHRSLGPPQGEEDSVPRDLPSWMKFLHGKLGNPIVPLNIRLFLAKLVINTEEVFRPY |
| | | AKHWLSPLLQLAASENNGGEGIHYMVVEIVATILSWTGLATPTGVPKDEVLANRLLNFLM |
| | | KHVFHPKRAVFRHNLEIIKTLVECWKDCLSIPYRLIFEKFSGKDPNSKDNSVGIQLLGIV |
| | | MANDLPPYDPQCGIQSSEYFQALVNNMSFVRYKEVYAAAAEVLGLILRYVMERKNILEES |
| | | LCELVAKQLKQHQNTMEDKFIVCLNKVTKSFPPLADRFMNAVFFLLPKFHGVLKTLCLEV |
| | | VLCRVEGMTELYFQLKSKDFVQVMRHRDDERQKVCLDIIYKMMPKLKPVELRELLNPVVE |
| | | PVSHPSTTCREQMYNILMWIHDNYRDPESETDNDSQEIFKLAKDVLIQGLIDENPGLQLI |
| | | IRNFWSHETRLPSNTLDRLLALNSLYSPKIEVHFLSLATNFLLEMTSMSPDYPNPMFEHP |
| | | LSECEFQEYTIDSDWRFRSTVLTPMFVETQASQGTLQTRTQEGLSARWPVAGQIRATQQ |
| | | QHDFTLTQTADGRSSFDWLTGSSTDPLVDHTSPSSDSLLFAHKRSERLQRAPLKSVGPDF |
| | | GKKRLGLPGDEVDNKVKGAAGRTDLLRLRRRFMRDQEKLSLMYARKGVAEQREKEIKSE |
| | | LKMKQDAQVVLYRSYRHGDLPDIQIKHSSLITPLQAVAQRDPIIAKQLFSSLFSGILKEM |
| | | DKFKTLSEKNNITQKLLQDFNRFLNTTFSFFPPFVSCIQDISCQHAALLSLDPAAVSAGC |
| | | LASLQQPVGIRLLEEALLRLLPAELPAKRVRGKARLPPDVLRWVELAKLYRSIGEYDVLR |
| | | GIFTSEIGTKQITQSALLAEARSDYSEAAKQYDEALNKQDWVDGEPTEAEKDFWELASLD |
| | | CYNHLAEWKSLEYCSTASIDSENPPDLNKIWSEPFYQETYLPYMIRSKLKLLLQGEADQS |
| | | LLTFIDKAMHGELQKAILELHYSQELSLLYLLQDDVRAKYYIQNGIQSFMQNYSSIDVL |
| | | LHQSRLTKLQSVQALTEIQEFISFISKQGNLSSQVPLKRLLNTWTNRYPDAKMDPMNIWD |
| | | DIITNRCFFLSKIEEKLTPLPEDNSMNVDQDGDPSDRMEVQEQEEDISSLIRSCKFSMKM |
| | | KMIDSARKQNNFSLAMKLLKELHKESKTRDDWLVSWVQSYCRLSHCRSRSQGCSEQVLTV |
| | | LKTVSLLDENNVSSYLSKNILAFRDQNILLGTTYRIIANALSSEPACLAEIEEDKARRIL |
| | | ELSGSSSEDSEKVIAGLYQRAFQHLSEAVQAAEEEAQPPSWSCGPAAGVIDAYMTLADFC |
| | | DQQLRKEEENASVIDSAELQAYPALVVEKMLKALKLNSNEARLKFPRLLQHERYPEETL |
| | | SLMTKEISSVPCWQFISWISHMVALLDKDQAVAVQHSVEEITDNYPQAIVYPFHSSESY |
| | | SFKDTSTGHKNKEFVARIKSKLDQGGVIQDFINALDQLSNPELLFKDWSNDVRAELAKTP |
| | | VNKKNIEKMYERMYAALGDPKAPGLGAFRRKFIQTFGKEFDKHFGKGGSKLLRMKLSDFN |
| | | DITNMLLLKMNKDSKPPGNLKECSPWMSDFKVEFLRNELEIPGQYDGRGKPLPEYHVRIA |
| | | GFDERVTVMASLRRPKRHIRGHDEREHPFLVKGGEDLRQDQRVEQLPQVMNGILAQDSA |
| | | CSQRALQLRTYSVVPMTSRLGLIEWLENTVTLKDLLLNTMSQEEKAAYLSDPRAPPCEYK |
| | | DWLTKMSGKHDVGAYMLMYKGANRTETVTSFRKRESKVPADLLKRAFVRMSTSPEAFLAL |
| | | RSHFASSHALICISHWILGISDRHLNNFMVAMETGGVIGIDFGHAFGSATQFLPVPELMP |
| | | FRLTRQFINLMLPMKETGLMYSIMVHALRAFRSDPGLLTNTMDVPVKEPSFDWKNFBQKM |
| | | LKKGGSWIQEINVAEKNWYPRQKICYAKRKLAGANPAVITCDELLLGHEKAPAFRDYVAV |
| | | ARGSKDHNIRAQEPESGLSEETQVKCLMDQATDPNILGRTWEGWEPWM |
| 45 | Spectrin alpha chain, | MDPSGVKVLETAEDIQERRQQVLDRYHRFKELSTRRQKLEDSYRFQFFQRDAEELEKWI |
| | brain (SPTANI) | QEKLQIASDENYKDPTNLQGKLQKHQAFEAEVQANSGAIVKLDETGNLMISEGHFASETI |
| | | RTRLMELHRQWELLLEKMREKGIKLLQAQKLVQYLRECEDVMDWINDKEAIVTSEELGQD |
| | | L [symbol] HVEVLQKKFEEPQTDMAAHEERVNEVQ [symbol] AAKLIQEQHPEEELIKTKQDEVNAAWQRL |
| | | KGLALQRQGKLPGAAEVQRFNRDVDETISWIKEKEQLMASDDFGRDLASVQALLRKHEGL |
| | | ERDLAALEDKVKALCAEADRLQQSHPLSATQIQVKREELITNWEQIRTLAAERHARLNDS |
| | | YRLQRFLADFRDLTSWVTEMKALINADELASDVAGAEALLDRHQEHKGEIDAHEDSFKSA |
| | | DESGQALLAAGHYASDEVREKLTVLSEERAALLELWELRRQQYEQCMDLQLFYRTEQVD |
| | | NWMSKQEAFLLNEDLGDSLDSVEALLKKHEDFEKSLSAQEEKITALDEFATKLIQNNHYA |
| | | MEDVATRRDALLSRRNALHERAMRRRAQLADSFHLQQFFRDSDELKSWVNEKMKTATDEA |
| | | YKDPSNLQGKVQKHQAFEAELSANQSRIDALEKAGQKLIDVNHYAKDEVAARMNEVISLW |
| | | KKLLEATELKGIKLREANQQQQFNRNVEDIELWLYVEGHLASDDYGKDLTNVQNLQKKH |
| | | ALLEADVAAHQDRIDGITIQARQFQDAGHFDAENIKKKQEALVARYEALKEPMVARKQKL |
| | | ADSLRLQQLFRDVEDEETWIREKEPIAASTNRGKDLIGVQNLLKKHQALQAEIAGHEPRI |
| | | KAVTQKGNAMVEEGHFAAEDVKAKLHELNQKWEALKAKASQRRQDLEDSLQAQQYFADAN |
| | | EA [symbol] SWMREKEPIVGSTDYGKDEDSAEALLKKHEALMSDLSAYGSSIQALREQAQSCRQQV |
| | | APTDDETGKELVLALYDYQEKSPREVTMKKGDILTLLNSTNKDWWKVEVNDRQGFVPAAY |
| | | VKKLDPAQSASRENLLEEQGSIALRQEQIDNQTRITKEAGSVSLRMKQVEELYHSLLELG |
| | | EKRKGMLEKSCKKFMLFREANELQQWINEKEAALTSEEVGADLEQVEVLQKKFDDPQKDL |
| | | KANESRLKDINKVAEDLESEGLMAEEVQAVQQQEVYGMMPRDETDSKTASPWKSARLMVH |
| | | TVATFNSIKELNERWRSLQQLAEERSQLLGSAHEVQRFHRDADETKEWIEEKNQALNTDN |
| | | YGHDLASVQALQRKHEGFERDLAALGDKVNSLGETAERLIQSHPESA [symbol] DLQEKTELNQA |
| | | WSSLGKRADQRKAKLGDSHDLQRLSDFRDLMSWINGIRGLVSSDELAKDVTGAEALLER |
| | | HQEHRTEIDARAGTFQAFEQFGQQLLAHGHYASPEIKQKLDILDQERADLEKAWVQRRMM |
| | | LDQCLELQLFHRDCEQAENWMAAREAFLNTEDKGDSLDSVEALIKKHEDFDKAINVQEEK |
| | | IAALQAFADQLIAAGHYAKGDISSRRNEVLDRWRRLKAQMIEKRSKLGESQTLQQFSRDV |
| | | DEIEAWISEKLQTASDESYKDPTNIQSKHQKHQAFEAELHANADRIRGVIDMGNSLIERG |
| | | ACAGSEDAVKARLAALADQWQPLVQRSAEKSQKLKEANKQQNFNTGIKDFDFWLSEVEAL |
| | | LASEDYGKDLASVNNLLKKHQLLEADISAHEDRLKDLNSQADSLMTSSAFDTSQVKDKRD |
| | | TINGRFQKIKSMAASRRAKLNESHRLHQFFRDMDDEESWIKEKKLLVGSEDYGRDLTGVQ |
| | | NLRKKHKRLEAELAAHEPAIQGVLDTGKKLSDDNTIGKEEIQQRLAQFVEHWKELKQLAA |
| | | ARGQRLEESLEYQQFVANVEEEEAWINEKMTLVASEDYGDTLAAIQGLLKKHEAFETDFT |
| | | VHKDRVNDVCTNGQDLIKKNNHHEENISSKMKGLNGKVSDLEKAAAQRKAKLDENSAFLQ |
| | | FNWKADVVESWIGEKENSLKTDDYGRDLSSVQTLLTKQETFDAGLQAFQQEGIANITALK |
| | | DQLLAAKHVQSKAIEARHASLMKRWSQLLANSAARKKKLLEAQSHFRKVEDLFLTFAKKA |
| | | SAFNSWPENAEEDLTDPVRCNSLEEIKALREAHDAFRSSLSSAQADFNQLAELDRQIKSF |
| | | RVASNPYTWFTMEALEETWRNLQKHKERELELQKEQRRQEENDKLRQEFAQHANAFHQW |
| | | IQETRTYLLDGSCMVEESGTLESQLEATKRKHQEIRAMRSQLKKIEDLGAAMEEALILDN |
| | | KYTEHSTVGLAQQWDQLDQLGMRMQHNLEQQIQARNTTGVTEEALKEFSMMFKHFDKDKS |
| | | GRLNHQEPKSCLRSLGYDLPMVEEGEPDPEFEAILDTVDPNRDGHVSLQEYMAFMISRET |
| | | ENVKSSEEIESAFRALSSEGKPYVTKEELYQNLTREQADYCVSHMKPYVDGKRELPTAF |
| | | DYVEFTRSLFVN |
| 46 | Eukaryotic initiation | MSGGSADYNREHGGPEGMDPDGVIESNWNEIVDNFDDMNLKESLLRGIYAYGFEKPSAIQ |
| | factor 4A-II (EIF4A2) | QRAHPCIKGYDVIAQAQSGTGKTATFAISILQQLEIEFKETQALVLAPTRELAQQIQKV |
| | | ILALGDYMGATCHACIGGTNVRNEMQKLQAEAPHIVVGTPGRVFDMLNRRYLSPKWIKMF |
| | | VLDEADEMLSRGFKDQIYEIFQKLNTISQVVLLSATMPTDVLEVTKKFMRDPIRILVKKE |
| | | ELTLEGIKQFYINVEREEWKLDTLCDLYETLTITQAVIFLNTRRKVDWLTEKMHARDFTV |
| | | SALHGMDQKERDVIMREPRSGSSRVLITIDLLARGIDVQQVSLVINYDLPTNRENYIHR |
| | | IGRGGRFGRKGVAINFVTEEDKRILRDIETFYNTITVEEMPMNVADLI |

[symbol]

indicates data missing or illegible when filed

TABLE 3
Predicted binding affinities of wild-type versus mutant polypeptides of IF4A2

| [symbol] | | | | | [symbol] | | | | | | |
|---|---|---|---|---|---|---|---|---|---|---|---|
| [symbol] | [symbol] | [symbol] | sub seq | [symbol] | [symbol] | [symbol] | [symbol] | sub seq | [symbol] | | |
| HLA | 24-3-11 | 9 | FVLDEADEM | 287.7 | HLA | 24-2-11 | 9 | FVLDEADEM | 12.5 | Seq ID No: 47 | Seq ID No: [symbol] |
| A* [symbol] | | | | | [symbol] | | | | | | |
| HLA | 24-3-12 | 16 | FVLDEADEML | 88.9 | HLA | 24-3-12 | 10 | FVLDEADEML | 9.6 | Seq ID No: 48 | Seq ID No: [symbol] |
| A* [symbol] | | | | | [symbol] | | | | | | |
| HLA | 24-4-12 | 9 | VEDEADEML | 91.9 | HLA | 24-4-12 | 9 | LLDEADEML | 86.6 | Seq ID No: 52 | Seq ID No: [symbol] |
| A* [symbol] | | | | | [symbol] | | | | | | |
| HLA | 24-3-11 | 8 | FVLDEADEM | 131.3 | HLA | 24-3-11 | 3 | FLLDEADEM | 8.8 | Seq ID No: [symbol] | Seq ID No: [symbol] |
| A* [symbol] | | | | | [symbol] | | | | | | |
| HLA | 24-3-12 | [symbol] | FVLDEADEML | 20.5 | HLA | 24-1-12 | 18 | FLLDEADEML | [symbol] | Seq ID No: [symbol] | Seq ID No: [symbol] |
| A* [symbol] | | | | | [symbol] | | | | | | |
| HLA | 24-4-12 | 9 | VLDEADEML | [symbol] | HLA | 24-4-12 | 8 | LLDEADEML | 17.2 | Seq ID No: [symbol] | Seq ID No: [symbol] |
| A* [symbol] | | | | | [symbol] | | | | | | |
| HLA | 24-3-11 | 8 | FVLDEADEM | [symbol] | HLA | 24-3- [symbol] | 8 | FLLDEADEM | [symbol] | Seq ID No: [symbol] | Seq ID No: [symbol] |
| A* [symbol] | | | | | [symbol] | | | | | | |
| HLA | 24-3-12 | 18 | FVLDEADEML | [symbol] | HLA | 24-3-12 | 10 | FLEDEADEML | 76.5 | Seq ID No: [symbol] | Seq ID No: [symbol] |
| A* [symbol] | | | | | [symbol] | | | | | | |
| HLA | 24-3-11 | 9 | FVLDEADEM | 18.2 | HLA | 24-3-11 | 8 | FLLDEADEM | 11.1 | Seq ID No: [symbol] | Seq ID No: [symbol] |
| A* [symbol] | | | | | [symbol] | | | | | | |
| HLA | 24-3-12 | 10 | FVLDEADEML | 49.9 | HLA | 24-1-12 | 18 | FLLDEADEML | [symbol] | Seq ID No: [symbol] | Seq ID No: [symbol] |
| A* [symbol] | | | | | [symbol] | | | | | | |
| HLA | 24-4-12 | 9 | VLDEADEML | [symbol] | HLA | 24-4-12 | 9 | LLDEADEML | 77.5 | Seq ID No: [symbol] | Seq ID No: [symbol] |
| A* [symbol] | | | | | [symbol] | | | | | | |
| HLA | 24-2-11 | 8 | FVLDEADEM | [symbol] | HLA | 24-3-11 | 9 | FLLDEADEM | 4.7 | Seq ID No: [symbol] | Seq ID No: [symbol] |
| A* [symbol] | | | | | [symbol] | | | | | | |
| HLA | 24-4-12 | 8 | VLDEADEML | 6.7 | HLA | 24-4-12 | 8 | LLDEADEML | [symbol] | Seq ID No: [symbol] | Seq ID No: [symbol] |
| A* [symbol] | | | | | [symbol] | | | | | | |
| HLA | 24-3-11 | [symbol] | FVLDEADEM | [symbol] | HLA | 24-3-11 | 9 | FLLDEADEM | 6.2 | Seq ID No: [symbol] | Seq ID No: [symbol] |
| A* [symbol] | | | | | [symbol] | | | | | | |
| HLA | 24-4-12 | [symbol] | VLDEADEML | 19.8 | HLA | 24-4-12 | 9 | LLDEADEML | 16.2 | Seq ID No: [symbol] | Seq ID No: [symbol] |
| A* [symbol] | | | | | [symbol] | | | | | | |
| HLA | 24-3-11 | [symbol] | FVLDEADEM | [symbol] | HLA | 24-3-11 | 9 | FLLDEADEM | 18.7 | Seq ID No: [symbol] | Seq ID No: [symbol] |
| A* [symbol] | | | | | [symbol] | | | | | | |
| HLA | 24-4-12 | 9 | VLDEADEML | 8.9 | HLA | 24- [symbol] -12 | 9 | LLDEADEML | 9.8 | Seq ID No: [symbol] | Seq ID No: [symbol] |
| A* [symbol] | | | | | [symbol] | | | | | | |
| HLA | 24-2-11 | 9 | FVLDEADEM | 281 | HLA | 24-3-11 | 9 | FLLDEADEM | [symbol] | Seq ID No: [symbol] | Seq ID No: [symbol] |
| A* [symbol] | | | | | [symbol] | | | | | | |
| HLA | 24-1-12 | 9 | VLDEADEML | 19.5 | HLA | 24-4-12 | 9 | LLDEADEML | 15.7 | Seq ID No: [symbol] | Seq ID No: [symbol] |
| A* [symbol] | | | | | [symbol] | | | | | | |
| HLA | 24-3-11 | [symbol] | FVLDEADEM | [symbol] | HLA | 24-3-11 | 9 | FLLDEADEM | 5.3 | Seq ID No: [symbol] | Seq ID No: [symbol] |
| A* [symbol] | | | | | [symbol] | | | | | | |
| HLA | 24-4-12 | [symbol] | VLDEADEML | 12.5 | HLA | 24-4-12 | [symbol] | LLDEADEML | 18.2 | Seq ID No: [symbol] | Seq ID No: [symbol] |
| A* [symbol] | | | | | [symbol] | | | | | | |
| HLA | 24-2-11 | 8 | FVLDEADEM | 348.6 | HLA | 24-3-11 | 9 | FLLDEADEM | >608 | Seq ID No: [symbol] | Seq ID No: [symbol] |
| A* [symbol] | | | | | [symbol] | | | | | | |
| HLA | 24-1-9 | 9 | [symbol] | >608 | HLA | 24-1-9 | 8 | KMFLLDEAD | 497.9 | Seq ID No: [symbol] | Seq ID No: [symbol] |
| A* [symbol] | | | | | [symbol] | | | | | | |
| HLA | 24-3-11 | [symbol] | FVLDEADEM | 86.9 | HLA | 24-3-11 | 9 | FLLDEADEM | >585 | Seq ID No: [symbol] | Seq ID No: [symbol] |
| A* [symbol] | | | | | [symbol] | | | | | | |
| HLA | 24-3-11 | [symbol] | FVLDEADEM | [symbol] | HLA | 24-3-11 | [symbol] | FLLDEADEM | [symbol] | Seq ID No: [symbol] | Seq ID No: [symbol] |
| A* [symbol] | | | | | [symbol] | | | | | | |
| | | | | | | | | | | Seq ID No: [symbol] | Seq ID No: [symbol] |

[symbol]

indicates data missing or illegible when filed

The application's sequence listing, which the Patent Office published only in electronic form, follows.

SEQUENCE LISTING (56 sequences)

SEQ ID NO: 1 - protein, 22 aa, Artificial Sequence
  Synthetic
REDLMGLTIGTHGSNIQQARKV

SEQ ID NO: 2 - protein, 14 aa, Artificial Sequence
  Synthetic
KHEAFETNFTVHKD

SEQ ID NO: 3 - protein, 12 aa, Artificial Sequence
  Synthetic
KANPNLPILIRE

SEQ ID NO: 4 - protein, 17 aa, Artificial Sequence
  Synthetic
RVNVIPVNLPGEHGQRL

SEQ ID NO: 5 - protein, 20 aa, Artificial Sequence
  Synthetic
  MISC_FEATURE (9)..(9): M is oxidized
RRPIQVMMMGSARVAAQLRR

SEQ ID NO: 6 - protein, 18 aa, Artificial Sequence
  Synthetic
KALAKSWNAAFLESSAKE

SEQ ID NO: 7 - protein, 23 aa, Artificial Sequence
  Synthetic
  MISC_FEATURE (12)..(12): M is oxidized
KLVSSENFDDYMKDVGVGFATRK

SEQ ID NO: 8 - protein, 21 aa, Artificial Sequence
  Synthetic
KSESEVEKAAIIAQRPDNPRE

SEQ ID NO: 9 - protein, 14 aa, Artificial Sequence
  Synthetic
RGVLKVFLQNVIRD

SEQ ID NO: 10 - protein, 20 aa, Artificial Sequence
  Synthetic
KAERMGFTVVTPVTGASLRR

SEQ ID NO: 11 - protein, 22 aa, Artificial Sequence
  Synthetic
KALYPSSVGQPFQGAYLKINKN

SEQ ID NO: 12 - protein, 17 aa, Artificial Sequence
  Synthetic
RGSDEGQFNEQNIVSKS

SEQ ID NO: 13 - protein, 17 aa, Artificial Sequence
  Synthetic
KFLFNTFTVLAGEDLKV

SEQ ID NO: 14 - protein, 18 aa, Artificial Sequence
  Synthetic
KLEEERSVLNNQLLEIKK

SEQ ID NO: 15 - protein, 22 aa, Artificial Sequence
  Synthetic
KEGGALSEATSLEGDEWELSKE

SEQ ID NO: 16 - protein, 23 aa, Artificial Sequence
  Synthetic
  MISC_FEATURE (4)..(4): M is oxidized
KRLMGVTPWEQELAQLEAWVGRD

SEQ ID NO: 17 - protein, 12 aa, Artificial Sequence
  Synthetic
KKVDLIQDLPRV

SEQ ID NO: 18 - protein, 19 aa, Artificial Sequence
  Synthetic
RYTVKVQQELELDELALRA

SEQ ID NO: 19 - protein, 21 aa, Artificial Sequence
  Synthetic
  MISC_FEATURE (13)..(13): M is oxidized
RLYQEAQKIVGAMVQIITYRD

SEQ ID NO: 20 - protein, 16 aa, Artificial Sequence
  Synthetic
KMLGVPANRIVVGVKR

SEQ ID NO: 21 - protein, 14 aa, Artificial Sequence
  Synthetic
KQLFNSLFSGILKE

SEQ ID NO: 22 - protein, 27 aa, Artificial Sequence
  Synthetic
  MISC_FEATURE (25)..(25): M is oxidized
RRQDLEDSLQAQQYFADANEAECWMRE

SEQ ID NO: 23 - protein, 15 aa, Artificial Sequence
  Synthetic
KMFLLDEADEMLSRG

SEQ ID NO: 24 - protein, 621 aa, Artificial Sequence
  Synthetic
MAELTVEVRGSNGAFYKGFIKDVHEDSLTVVFENNWQPERQVPFNEVRLPPPPDIKKEISEGDEVEVYSRANDQEPCGWWLAKVRMMKGEFYVIEYAACDATYNEIVTFERLRPVNQNKTVKKNTFFKCTVDVPEDLREACANENAHKDFKKAVGACRIFYHPETTQLMILSASEATVKRVNILSDMHLRSIRTKLMLMSRNEEATKHLECTKQLAAAFHEEFVVREDLMGLAIGTHGSNIQQARKVPGVTAIELDEDTGTFRIYGESADAVKKARGFLEFVEDFIQVPRNLVGKVIGKNGKVIQEIVDKSGVVRVRIEGDNENKLPREDGMVPFVFVGTKESIGNVQVLLEYHIAYLKEVEQLRMERLQIDEQLRQIGSRSYSGRGRGRRGPNYTSGYGTNSELSNPSETESERKDELSDWSLAGEDDRDSRHQRDSRRRPGGRGRSVSGGRGRGGPRGGKSSISSVLKDPDSNPYSLLDNTESDQTADTDASESHHSTNRRRRSRRRRTDEDAVLMDGMTESDTASVNENGLVTVADYISRAESQSRQRNLPRETLAKNKKEMAKDVIEEHGPSEKAINGPTSASGDDISKLQRTPGEEKINTLKEENTQEAAVLNGVS

SEQ ID NO: 25 - protein, 2472 aa, Artificial Sequence
  Synthetic
MDPSGVKVLETAEDIQERRQQVLDRYHRFKELSTLRRQKLEDSYRFQFFQRDAEELEKWIQEKLQIASDENYKDPTNLQGKLQKHQAFEAEVQANSGAIVKLDETGNLMISEGHFASETIRTRLMELHRQWELLLEKMREKGIKLLQAQKLVQYLRECEDVMDWINDKEAIVTSEELGQDLEHVEVLQKKFEEFQTDMAAHEERVNEVNQFAAKLIQEQHPEEELIKTKQDEVNAAWQRLKGLALQRQGKLFGAAEVQRFNRDVDETISWIKEKEQLMASDDFGRDLASVQALLRKHEGLERDLAALEDKVKALCAEADRLQQSHPLSATQIQVKREELITNWEQIRTLAAERHARLNDSYRLQRFLADFRDLTSWVTEMKALINADELASDVAGAEALLDRHQEHKGEIDAHEDSFKSADESGQALLAAGHYASDEVREKLTVLSEERAALLELWELRRQQYEQCMDLQLFYRDTEQVDNWMSKQEAFLLNEDLGDSLDSVEALLKKHEDFEKSLSAQEEKITALDEFATKLIQNNHYAMEDVATRRDALLSRRNALHERAMRRRAQLADSFHLQQFFRDSDELKSWVNEKMKTATDEAYKDPSNLQGKVQKHQAFEAELSANQSRIDALEKAGQKLIDVNHYAKDEVAARMNEVISLWKKLLEATELKGIKLREANQQQQFNRNVEDIELWLYEVEGHLASDDYGKDLTNVQNLQKKHALLEADVAAHQDRIDGITIQARQFQDAGHFDAENIKKKQEALVARYEALKEPMVARKQKLADSLRLQQLFRDVEDEETWIREKEPIAASTNRGKDLIGVQNLLKKHQALQAEIAGHEPRIKAVTQKGNAMVEEGHFAAEDVKAKLHELNQKWEALKAKASQRRQDLEDSLQAQQYFADANEAESWMREKEPIVGSTDYGKDEDSAEALLKKHEALMSDLSAYGSSIQALREQAQSCRQQVAPTDDETGKELVLALYDYQEKSPREVTMKKGDILTLLNSTNKDWWKVEVNDRQGFVPAAYVKKLDPAQSASRENLLEEQGSIALRQEQIDNQTRITKEAGSVSLRMKQVEELYHSLLELGEKRKGMLEKSCKKFMLFREANELQQWINEKEAALTSEEVGADLEQVEVLQKKFDDFQKDLKANESRLKDINKVAEDLESEGLMAEEVQAVQQQEVYGMMPRDETDSKTASPWKSARLMVHTVATFNSIKELNERWRSLQQLAEERSQLLGSAHEVQRFHRDADETKEWIEEKNQALNTDNYGHDLASVQALQRKHEGFERDLAALGDKVNSLGETAERLIQSHPESAEDLQEKCTELNQAWSSLGKRADQRKAKLGDSHDLQRFLSDFRDLMSWINGIRGLVSSDELAKDVTGAEALLERHQEHRTEIDARAGTFQAFEQFGQQLLAHGHYASPEIKQKLDILDQERADLEKAWVQRRMMLDQCLELQLFHRDCEQAENWMAAREAFLNTEDKGDSLDSVEALIKKHEDFDKAINVQEEKIAALQAFADQLIAAGHYAKGDISSRRNEVLDRWRRLKAQMIEKRSKLGESQTLQQFSRDVDEIEAWISEKLQTASDESYKDPTNIQSKHQKHQAFEAELHANADRIRGVIDMGNSLIERGACAGSEDAVKARLAALADQWQFLVQKSAEKSQKLKEANKQQNFNTGIKDFDFWLSEVEALLASEDYGKDLASVNNLLKKHQLLEADISAHEDRLKDLNSQADSLMTSSAFDTSQVKDKRDTINGRFQKIKSMAASRRAKLNESHRLHQFFRDMDDEESWIKEKKLLVGSEDYGRDLTGVQNLRKKHKRLEAELAAHEPAIQGVLDTGKKLSDDNTIGKEEIQQRLAQFVEHWKELKQLAAARGQRLEESLEYQQFVANVEEEEAWINEKMTLVASEDYGDTLAAIQGLLKKHEAFETDFTVHKDRVNDVCTNGQDLIKKNNHHEENISSKMKGLNGKVSDLEKAAAQRKAKLDENSAFLQFNWKADVVESWIGEKENSLKTDDYGRDLSSVQTLLTKQETFDAGLQAFQQEGIANITALKDQLLAAKHVQSKAIEARHASLMKRWSQLLANSAARKKKLLEAQSHFRKVEDLFLTFAKKASAFNSWFENAEEDLTDPVRCNSLEEIKALREAHDAFRSSLSSAQADFNQLAELDRQIKSFRVASNPYTWFTMEALEETWRNLQKIIKERELELQKEQRRQEENDKLRQEFAQHANAFHQWIQETRTYLLDGSCMVEESGTLESQLEATKRKHQEIRAMRSQLKKIEDLGAAMEEALILDNKYTEHSTVGLAQQWDQLDQLGMRMQHNLEQQIQARNTTGVTEEALKEFSMMFKHFDKDKSGRLNHQEFKSCLRSLGYDLPMVEEGEPDPEFEAILDTVDPNRDGHVSLQEYMAFMISRETENVKSSEEIESAFRALSSEGKPYVTKEELYQNLTREQADYCVSHMKPYVDGKGRELPTAFDYVEFTRSLFVN

SEQ ID NO: 26 - protein, 99 aa, Artificial Sequence
  Synthetic
MAAAAASRGVGAKLGLREIRIHLCQRSPGSQGVRDFIEKRYVELKKANPDLPILIRECSDVQPKLWARYAFGQETNVPLNNFSADQVTRALENVLSGKA

SEQ ID NO: 27 - protein, 2386 aa, Artificial Sequence
  Synthetic
MLRGPGPGLLLLAVQCLGTAVPSTGASKSKRQAQQMVQPQSPVAVSQSKPGCYDNGKHYQINQQWERTYLGNALVCTCYGGSRGFNCESKPEAEETCFDKYTGNTYRVGDTYERPKDSMIWDCTCIGAGRGRISCTIANRCHEGGQSYKIGDTWRRPHETGGYMLECVCLGNGKGEWTCKPIAEKCFDHAAGTSYVVGETWEKPYQGWMMVDCTCLGEGSGRITCTSRNRCNDQDTRTSYRIGDTWSKKDNRGNLLQCICTGNGRGEWKCERHTSVQTTSSGSGPFTDVRAAVYQPQPHPQPPPYGHCVTDSGVVYSVGMQWLKTQGNKQMLCTCLGNGVSCQETAVTQTYGGNSNGEPCVLPFTYNGRTFYSCTTEGRQDGHLWCSTTSNYEQDQKYSFCTDHTVLVQTRGGNSNGALCHFPFLYNNHNYTDCTSEGRRDNMKWCGTTQNYDADQKFGFCPMAAHEEICTTNEGVMYRIGDQWDKQHDMGHMMRCTCVGNGRGEWTCIAYSQLRDQCIVDDITYNVNDTFHKRHEEGHMLNCTCFGQGRGRWKCDPVDQCQDSETGTFYQIGDSWEKYVHGVRYQCYCYGRGIGEWHCQPLQTYPSSSGPVEVFITETPSQPNSHPIQWNAPQPSHISKYILRWRPKNSVGRWKEATIPGHLNSYTIKGLKPGVVYEGQLISIQQYGHQEVTRFDFTTTSTSTPVTSNTVTGETTPFSPLVATSESVTEITASSFVVSWVSASDTVSGFRVEYELSEEGDEPQYLDLPSTATSVNIPDLLPGRKYIVNVYQISEDGEQSLILSTSQTTAPDAPPDTTVDQVDDTSIVVRWSRPQAPITGYRIVYSPSVEGSSTELNLPETANSVTLSDLQPGVQYNITIYAVEENQESTPVVIQQETTGTPRSDTVPSPRDLQFVEVTDVKVTIMWTPPESAVTGYRVDVIPVNLPGEHGQRLPISRNTFAEVTGLSPGVTYYFKVFAVSHGRESKPLTAQQTTKLDAPTNLQFVNETDSTVLVRWTPPRAQITGYRLTVGLTRRGQPRQYNVGPSVSKYPLRNLQPASEYTVSLVAIKGNQESPKATGVFTTLQPGSSIPPYNTEVTETTIVITWTPAPRIGFKLGVRPSQGGEAPREVTSDSGSIVVSGLTPGVEYVYTIQVLRDGQERDAPIVNKVVTPLSPPTNLHLEANPDTGVLTVSWERSTTPDITGYRITTTPTNGQQGNSLEEVVHADQSSCTFDNLSPGLEYNVSVYTVKDDKESVPISDTIIPAVPPPTDLRFTNIGPDTMRVTWAPPPSIDLTNFLVRYSPVKNEEDVAELSISPSDNAVVLTNLLPGTEYVVSVSSVYEQHESTPLRGRQKTGLDSPTGIDFSDITANSFTVHWIAPRATITGYRIRHHPEHFSGRPREDRVPHSRNSITLTNLTPGTEYVVSIVALNGREESPLLIGQQSTVSDVPRDLEVVAATPTSLLISWDAPAVTVRYYRITYGETGGNSPVQEFTVPGSKSTATISGLKPGVDYTITVYAVTGRGDSPASSKPISINYRTEIDKPSQMQVTDVQDNSISVKWLPSSSPVTGYRVTTTPKNGPGPTKTKTAGPDQTEMTIEGLQPTVEYVVSVYAQNPSGESQPLVQTAVTNIDRPKGLAFTDVDVDSIKIAWESPQGQVSRYRVTYSSPEDGIHELFPAPDGEEDTAELQGLRPGSEYTVSVVALHDDMESQPLIGTQSTAIPAPTDLKFTQVTPTSLSAQWTPPNVQLTGYRVRVTPKEKTGPMKEINLAPDSSSVVVSGLMVATKYEVSVYALKDTLTSRPAQGVVTTLENVSPPRRARVTDATETTITISWRTKTETITGFQVDAVPANGQTPIQRTIKPDVRSYTITGLQPGTDYKIYLYTLNDNARSSPVVIDASTAIDAPSNLRFLATTPNSLLVSWQPPRARITGYIIKYEKPGSPPREVVPRPRPGVTEATITGLEPGTEYTIYVIALKNNQKSEPLIGRKKTDELPQLVTLPHPNLHGPEILDVPSTVQKTPFVTHPGYDTGNGIQLPGTSGQQPSVGQQMIFEEHGFRRTTPPTTATPIRHRPRPYPPNVGEEIQIGHIPREDVDYHLYPHGPGLNPNASTGQEALSQTTISWAPFQDTSEYIISCHPVGTDEEPLQFRVPGTSTSATLTGLTRGATYNVIVEALKDQQRHKVREEVVTVGNSVNEGLNQPTDDSCFDPYTVSHYAVGDEWERMSESGFKLLCQCLGFGSGHFRCDSSRWCHDNGVNYKIGEKWDRQGENGQMMSCTCLGNGKGEFKCDPHEATCYDDGKTYHVGEQWQKEYLGAICSCTCFGGQRGWRCDNCRRPGGEPSPEGTTGQSYNQYSQRYHQRTNTNVNCPIECFMPLDVQADREDSRE

SEQ ID NO: 28 - protein, 156 aa, Artificial Sequence
  Synthetic
MEPAAGSSMEPSADWLATAAARGRVEEVRALLEAGALPNAPNSYGRRPIQVMMMGSARVAELLLLHGAEPNCADPATLTRPVHDAAREGFLDTLVVLHRAGARLDVRDAWGRLPVDLAEELGHRDVARYLRAAAGGTRGSNHARIDAAEGPSDIPD

SEQ ID NO: 29 - protein, 184 aa, Artificial Sequence
  Synthetic
MPQSKSRKIAILGYRSVGKSSLTIQFVEGQFVDSYDPTIENTFTKLITVNGQEYHLQLVDTAGQDEYSIFPQTYSIDINGYILVYSVTSIKSFEVIKVIHGKLLDMVGKVQIPIMLVGNKKDLHMERVISYEEGKALAESWNAAFLESSAKENQTAVDVFRRIILEAEKMDGAASQGKSSCSVM

SEQ ID NO: 30 - protein, 132 aa, Artificial Sequence
  Synthetic
MCDAFVGTWKLVSSENFDDYMKEVGVGFATRKVAGMAKPNMIISVNGDVITIKSESTFKNTEISFILGQEFDEVTADDRKVKSTITLDGGVLVHVQKWDGKSTTIKRKREDDKLVVECVMKGVTSTRVYERA

SEQ ID NO: 31 - protein, 649 aa, Artificial Sequence
  Synthetic
MAGVSFSGHRLELLAAYEEVIREESAADWALYTYEDGSDDLKLAASGEGGLQELSGHFENQKVMYGFCSVKDSQAALPKYVLINWVGEDVPDARKCACASHVAKVAEFFQGVDVIVNASSVEDIDAGAIGQRLSNGLARLSSPVLHRLRLREDENAEPVGTTYQKTDAAVEMKRINREQFWEQAKKEEELRKEEERKKALDERLRFEQERMEQERQEQEERERRYREREQQIEEHRRKQQTLEAEEAKRRLKEQSIFGDHRDEEEETHMKKSESEVEEAAAIIAQRPDNPREFFKQQERVASASAGSCDVPSPFNHRPGSHLDSHRRMAPTPIPTRSPSDSSTASTPVAEQIERALDEVTSSQPPPLPPPPPPAQETQEPSPILDSEETRAAAPQAWAGPMEEPPQAQAPPRGPGSPAEDLMFMESAEQAVLAAPVEPATADATEIHDAADTIETDTATADTTVANNVPPAATSLIDLWPGNGEGASTLQGEPRAPTPPSGTEVTLAEVPLLDEVAPEPLLPAGEGCATLLNFDELPEPPATFCDPEEVEGESLAAPQTPTLPSALEELEQEQEPEPHLLTNGETTQKEGTQASEGYFSQSQEEEFAQSEELCAKAPPPVFYNKPPEIDITCWDADPVPEEEEGFEGGD

SEQ ID NO: 32 - protein, 103 aa, Artificial Sequence [sequence omitted]

SEQ ID NO: 33 - protein, 1226 aa, Artificial Sequence
  Synthetic
MNPRQGYSLSGYYTHPFQGYEHRQLRYQQPGPGSSPSSFLLKQIEFLKGQLPEAPVIGKQTPSLPPSLPGLRPRFPVLLASSTRGRQVDIRGVPRGVHLRSQGLQRGFQHPSPRGRSLPQRGVDCLSSHFQELSIYQDQEQRILKFLEELGEGKATTAHDLSGKLGTPKKEINRVLYSLAKKGKLQKEAGTPPLWKIAVSTQAWNQHSGVVRPDGHSQGAPNSDPSLEPEDRNSTSVSEDLLEPFIAVSAQAWNQHSGVVRPDSHSQGSPNSDPGLEPEDSNSTSALEDPLEFLDMAEIKEKICDYLFNVSDSSALNLAKNIGLTKARDINAVLIDMERQGDVYRQGTTPPIWHLTDKKRERMQIKRNTNSVPETAPAAIPETKRNAEFLTCNIPTSNASNNMVTTEKVENGQEPVIKLENRQEARPEPARLKPPVHYNGPSKAGYVDFENGQWATDDIPDDLNSIRAAPGEFRAIMEMPSFYSHGLPRCSPYKKLTECQLKNPISGLLEYAQFASQTCEFNMIEQSGPPHEPRFKFQVVINGREFPPAEAGSKKVAKQDAAMKAMTILLEEAKAKDSGKSEESSHYSTEKESEKTAESQTPTPSATSFFSGKSPVTTLLECMHKLGNSCEFRLLSKEGPAHEPKFQYCVAVGAQTFPSVSAPSKKVAKQMAAEEAMKALHGEATNSMASDNQPEGMISESLDNLESMMPNKVRKIGELVRYLNTNPVGGLLEYARSHGFAAEFKLVDQSGPPHEPKFVYQAKVGGRWFPAVCAHSKKQGKQEAADAALRVLIGENEKAERMGFTEVTPVTGASLRRTMLLLSRSPEAQPKTLPLTGSTFHDQIAMLSHRCFNTLTNSFQPSLLGRKILAAIIMKKDSEDMGVVVSLGTGNRCVKGDSLSLKGETVNDCHAEIISRRGFIRFLYSELMKYNSQTAKDSIFEPAKGGEKLQIKKTVSFHLYISTAPCGDGALFDKSCSDRAMESTESRHYPVFENPKQGKLRTKVENGEGTIPVESSDIVPTWDGIRLGERLRTMSCSDKILRWNVLGLQGALLTHFLQPIYLKSVTLGYLFSQGHLTRAICCRVTRDGSAFEDGLRHPFIVNHPKVGRVSIYDSKRQSGKTKETSVNWCLADGYDLEILDGTRGTVDGPRNELSRVSKKNIFLLFKKLCSFRYRRDLLRLSYGEAKKAARDYETAKNYFKKGLKDMGYGNWISKPQEEKNFYLCPV

SEQ ID NO: 34 - protein, 1136 aa, Artificial Sequence
  Synthetic
MAKMEVKTSLLDNMIGVGDMVLLEPLNEETFINNLKKRFDHSEIYTYIGSVVISVNPYRSLPIYSPEKVEEYRNRNFYELSPHIFALSDEAYRSLRDQDKDQCILITGESGAGKTEASKLVMSYVAAVCGKGAEVNQVKEQLLQSNPVLEAFGNAKTVRNDNSSRFGKYMDIEFDFKGDPLGGVISNYLLEKSRVVKQPRGERNFHVFYQLLSGASEELLNKLKLERDFSRYNYLSLDSAKVNGVDDAANFRTVRNAMQIVGFMDHEAESVLAVVAAVLKLGNIEFKPESRVNGLDESKIKDKNELKEICELTGIDQSVLERAFSFRTVEAKQEKVSTTLNVAQAYYARDALAKNLYSRLFSWLVNRINESIKAQTKVRKKVMGVLDIYGFEIFEDNSFEQFIINYCNEKLQQIFIELTLKEEQEEYIREDIEWTHIDYFNNAIICDLIENNTNGILAMLDEECLRPGTVTDETFLEKLNQVCATHQHFESRMSKCSRFLNDTSLPHSCFRIQHYAGKVLYQVEGFVDKNNDLLYRDLSQAMWKASHALIKSLFPEGNPAKINLKRPPTAGSQFKASVATLMKNLQTKNPNYIRCIKPNDKKAAHIFNEALVCHQIRYLGLLENVRVRRAGYAFRQAYEPCLERYKMLCKQTWPHWKGPARSGVEVLFNELEIPVEEYSFGRSKIFIRNPRTLFKLEDLRKQRLEDLATLIQKIYRGWKCRTHFLLMKKSQIVIAAWYRRYAQQKRYQQTKSSALVIQSYIRGWKARKILRELKHQKRCKEAVTTIAAYWHGTQARRELRRLKEEARNKHAIAVIWAYWLGSKARRELKRLKEEARRKHAVAVIWAYWLGLKVRREYRKFFRANAGKKIYEFTLQRIVQKYFLEMKNKMPSLSPIDKNWPSRPYLFLDSTHKELKRIFHLWRCKKYRDQFTDQQKLIYEEKLEASELFKDKKALYPSSVGQPFQGAYLEINKNPKYKKLKDAIEEKIIIAEVVNKINRANGKSTSRIFLLTNNNLLLADQKSGQIKSEVPLVDVTKVSMSSQNDGFFAVHLKEGSEAASKGDFLFSSDHLIEMATKLYRTTLSQTKQKLNIEISDEFLVQFRQDKVCVKFIQGNQKNGSVPTCKRKNNRLLEVAVP

SEQ ID NO: 35 - protein, 459 aa, Artificial Sequence
  Synthetic
MSNCLQNFLKITSTRLLCSRLCQQLRSKRKFFGTVPISRLHRRVVITGIGLVTPLGVGTHLVWDRLIGGESGIVSLVGEEYKSIPCSVAAYVPRGSDEGQFNEQNFVSKSDIKSMSSPTIMAIGAAELAMKDSGWHPQSEADQVATGVAIGMGMIPLEVVSETALNFQTKGYNKVSPFFVPKILVNMAAGQVSIRYKLKGPNHAVSTACTTGAHAVGDSFRFIAHGDADVMVAGGTDSCISPLSLAGFSRARALSTNSDPKLACRPFHPKRDGFVMGEGAAVLVLEEYEHAVQRRARIYAEVLGYGLSGDAGHITAPDPEGEGALRCMAAALKDAGVQPEEISYINAHATSTPLGDAAENKAIKHLFKDHAYALAVSSTKGATGHLLGAAGAVEAAFTTLACYYQKLPPTLNLDCSEPEFDLNYVPLKAQEWKTEKRFIGLTNSFGFGGTNATLCIAGL

SEQ ID NO: 36 - protein, 34350 aa, Artificial Sequence
  Synthetic
MTTQAPTFTQPLQSVVVLEGSTATFEAHISGFPVPEVSWFRDGQVISTSTLPGVQISFSDGRAKLTIPAVTKANSGRYSLKATNGSGQATSTAELLVKAETAPPNFVQRLQSMTVRQGSQVRLQVRVTGIPTPVVKFYRDGAEIQSSLDFQISQEGDLYSLLIAEAYPEDSGTYSVNATNSVGRATSTAELLVQGEEEVPAKKTKTIVSTAQISESRQTRIEKKIEAHFDARSIATVEMVIDGAAGQQLPHKTPHRIPPKPKSRSPTPPSIAAKAQLARQQSPSPIRHSPSPVRHVRAPTPSPVRSVSPAARISTSPIRSVRSPLLMRKTQASTVATGPEVPPPWKQEGYVASSSEAEMRETTLTTSTQIRTEERWEGRYGVQEQVTISGAAGAAASVSASASYAAEAVATGAKEVKQDADKSAAVATVVAAVDMARVREPVISAVEQTAQRTTTTAVHIQPAQEQVRKEAEKTAVTKVVVAADKAKEQELKSRTKEVITTKQEQMHVTHEQIRKETEKTFVPKVVISAAKAKEQETRISEEITKKQKQVTQEAIRQETEITAASMVVVATAKSTKLETVPGAQEETTTQQDQMHLSYEKIMKETRKTVVPKVIVATPKVKEQDLVSRGREGITTKREQVQITQEKMRKEAEKTALSTIAVATAKAKEQETILRTRETMATRQEQIQVTHGKVDVGKKAEAVATVVAAVDQARVREPREPGHLEESYAQQTTLEYGYKERISAAKVAEPPQRPASEPHVVPKAVKPRVIQAPSETHIKTTDQKGMHISSQIKKTTDLTTERLVHVDKRPRTASPHFTVSKISVPKTEHGYEASIAGSAIATLQKELSATSSAQKITKSVKAPTVKPSETRVRAEPTPLPQFPFADTPDTYKSEAGVEVKKEVGVSITGTTVREERFEVLHGREAKVTETARVPAPVEIPVTPPTLVSGLKNVTVIEGESVTLECHISGYPSPTVTWYREDYQIESSIDFQITFQSGIARLMIREAFAEDSGRFTCSAVNEAGTVSTSCYLAVQVSEEFEKETTAVTEKFTTEEKRFVESRDVVMTDTSLTEEQAGPGEPAAPYFITKPVVQKLVEGGSVVFGCQVGGNPKPHVYWKKSGVPLTTGYRYKVSYNKQTGECKLVISMTFADDAGEYTIVVRNKHGETSASASLLEEADYELLMKSQQEMLYQTQVTAFVQEPKVGETAPGFVYSEYEKEYEKEQALIRKKMAKDTVVVRTYVEDQEFHISSFEERLIKEIEYRIIKTTLEELLEEDGEEKMAVDISESEAVESGFDLRIKNYRILEGMGVTFHCKMSGYPLPKIAWYKDGKRIKHGERYQMDFLQDGRASLRIPVVLPEDEGIYTAFASNIKGNAICSGKLYVEPAAPLGAPTYIPTLEPVSRIRSLSPRSVSRSPIRMSPARMSPARMSPARMSPARMSPGRRLEETDESQLERLYKPVFVLKPVSFKCLEGQTARFDLKVVGRPMPETFWFHDGQQIVNDYTHKVVIKEDGTQSLIIVPATPSDSGEWTVVAQNRAGRSSISVILTVEAVEHQVKPMFVEKLKNVNIKEGSQLEMKVRATGNPNPDIVWLKNSDIIVPHKYPKIRIEGTKGEAALKIDSTVSQDSAWYTATAINKAGRDTTRCKVNVEVEFAEPEPERKLIIPRGTYRAKEIAAPELEPLHLRYGQEQWEEGDLYDKEKQQKPFFKKKLTSLRLKRFGPAHFECRLTPIGDPTMVVEWLHDGKPLEAANRLRMINEFGYCSLDYGVAYSRDSGIITCRATNKYGTDHTSATLIVKDEKSLVEESQLPEGRKGLQRIEELERMAHEGALTGVTTDQKEKQKPDIVLYPEPVRVLEGETARFRCRVTGYPQPKVNWYLNGQLIRKSKRFRVRYDGIHYLDIVDCKSYDTGEVKVTAENPEGVIEHKVKLEIQQREDFRSVLRRAPEPRPEFHVHEPGKLQFEVQKVDRPVDTTETKEVVKLKRAERITHEKVPEESEELRSKFKRRTEEGYYEAITAVELKSRKKDESYEELLRKTKDELLHWTKELTEEEKKALAEEGKITIPTFKPDKIELSPSMEAPKIFERIQSQTVGQGSDAHFRVRVVGKPDPECEWYKNGVKIERSDRIYWYWPEDNVCELVIRDVTAEDSASIMVKAINIAGETSSHAFLLVQAKQLITFTQELQDVVAKEKDTMATFECETSEPFVKVKWYKDGMEVHEGDKYRMHSDRKVHFLSILTIDTSDAEDYSCVLVEDENVKTTAKLIVEGAVVEFVKELQDIEVPESYSGELECIVSPENIEGKWYHNDVELKSNGKYTITSRRGRQNLTVKDVTKEDQGEYSFVIDGKKTTCKLKMKPRPIAILQGLSDQKVCEGDIVQLEVKVSLESVEGVWMKDGQEVQPSDRVHIVIDKQSHMLLIEDMTKEDAGNYSFTIPALGLSTSGRVSVYSVDVITPLKDVNVIEGTKAVLECKVSVPDVTSVKWYLNDEQIKPDDRVQAIVKGTKQRLVINRTHASDEGPYKLIVGRVETNCNLSVEKIKIIRGLRDLTCTETQNVVFEVELSHSGIDVLWNFKDKEIKPSSKYKIEAHGKIYKLTVLNMMKDDEGKYTFYAGENITSGKLTVAGGAISKPLTDQTVAESQEAVFECEVANPDSKGEWLRDGKHLPLTNNIRSESDGHKRRLIIAATKLDDIGEYTYKVATSKTSAKLKVEAVKIKKTLKNLTVTETQDAVFTVELTHPNVKGVQWIKNGVVLESNEKYAISVKGTIYSLRIKNCAIVDESVYGFRLGRLGASARLHVETVKIIKKPKDVTALENATVAFEVSVSHDTVPVKWFHKNVEIKPSDKHRLVSERKVHKLMLQNISPSDAGEYTAVVGQLECKAKLFVETLHITKTMKNIEVPETKTASFECEVSHFNVPSMWLKNGVEIEMSEKFKIVVQGKLHQLIIMNTSTEDSAEYTFVCGNDQVSATLTVTPIMITSMLKDINAEEKDTITFEVTVNYEGISYKWLKNGVEIKSTDKCQMRTKKLTHSLNIRNVHFGDAADYTFVAGKATSTATLYVEARHIEFRKHIKDIKVLEKKRAMFECEVSEPDITVQWMKDDQELQITDRIKIQKEKYVHRLLIPSTRMSDAGKYTVVAGGNVSTAKLFVEGRDVRIRSIKKEVQVIEKQRAVVEFEVNEDDVDAHWYKDGIEINFQVQERHKYVVERRIHRMFISETRQSDAGEYTFVAGRNRSSVTLYVNAPEPPQVLQELQPVTVQSGKPARFCAVISGRPQPKISWYKEEQLLSTGFKCKFLHDGQEYTLLLIEAFPEDAAVYTCEAKNDYGVATTSASLSVEVPEVVSPDQEMPVYPPAIITPLQDTVTSEGQPARFQCRVSGTDLKVSWYSKDKKIKPSRFFRMTQFEDTYQLEIAEAYPEDEGTYTFVASNAVGQVSSTANLSLEAPESILHERIEQEIEMEMKEFSSSFLSAEEEGLHSAELQLSKINETLELLSESPVYSTKFDSEKEGTGPIFIKEVSNADISMGDVATLSVTVIGIPKPKIQWFFNGVLLTPSADYKFVFDGDDHSLIILFTKLEDEGEYTCMASNDYGKTICSAYLKINSKGEGHKDTETESAVAKSLEKLGGPCPPHFLKELKPIRCAQGLPAIFEYTVVGEPAPTVTWFKENKQLCTSVYYTIIHNPNGSGTFIVNDPQREDSGLYICKAENMLGESTCAAELLVLLEDTDMTDTPCKAKSTPEAPEDFPQTPLKGPAVEALDSEQEIATFVKDTILKAALITEENQQLSYEHIAKANELSSQLPLGAQELQSILEQDKLTPESTREFLCINGSIHFQPLKEPSPNLQLQIVQSQKTFSKEGILMPEEPETQAVLSDTEKIFPSAMSIEQINSLTVEPLKTLLAEPEGNYPQSSIEPPMHSYLTSVAEEVLSPKEKTVSDTNREQRVTLQKQEAQSALILSQSLAEGHVESLQSPDVMISQVNYEPLVPSEHSCTEGGKILIESANPLENAGQDSAVRIEEGKSLRFPLALEEKQVLLKEEHSDNVVMPPDQIIESKREPVAIKKVQEVQGRDLLSKESLLSGIPEEQRLNLKIQICRALQAAVASEQPGLFSEWLRNIEKVEVEAVNITQEPRHIMCMYLVTSAKSVTEEVTIIIEDVDPQMANLKMELRDALCAIIYEEIDILTAEGPRIQQGAKTSLQEEMDSFSGSQKVEPITEPEVESKYLISTEEVSYFNVQSRVKYLDATPVTKGVASAVVSDEKQDESLKPSEEKEESSSESGTEEVATVKIQEAEGGLIKEDGPMIHTPLVDTVSEEGDIVHLTTSITNAKEVNWYFENKLVPSDEKFKCLQDQNTYTLVIDKVNTEDHQGEYVCEALNDSGKTATSAKLTVVKRAAPVIKRKIEPLEVALGHLAKFTCEIQSAPNVRFQWFKAGREIYESDKCSIRSSKYISSLEILRTQVVDCGEYTCKASNEYGSVSCTATLTVTEAYPPTFLSRPKSLTTFVGKAAKFICTVTGTPVIETIWQKDGAALSPSPNWKISDAENKHILELSNLTIQDRGVYSCKASNKFGADICQAELIIIDKPHFIKELEPVQSAINKKVHLECQVDEDRKVTVTWSKDGQKLPPGKDYKICFEDKIATLEIPLAKLKDSGTYVCTASNEAGSSSCSATVTVREPPSFVKKVDPSYLMLPGESARLHCKLKGSPVIQVTWFKNNKELSESNTVRMYFVNSEAILDITDVKVEDSGSYSCEAVNDVGSDSCSTEIVIKEPPSFIKTLEPADIVRGTNALLQCEVSGTGPFEISWFKDKKQIRSSKKYRLFSQKSLVCLEIFSFNSADVGEYECVVANEVGKCGCMATHLLKEPPTFVKKVDDLIALGGQTVTLQAAVRGSEPISVTWMKGQEVIREDGKIKMSFSNGVAVLIIPDVQISFGGKYTCLAENEAGSQTSVGELIVKEPAKIIERAELIQVTAGDPATLEYTVAGTPELKPKWYKDGRPLVASKKYRISFKNNVAQLKFYSAELHDSGQYTFEISNEVGSSSCETTFTVLDRDIAPFFTKPLRNVDSVVNGTCRLDCKIAGSLPMRVSWFKDGKEIAASDRYRIAFVEGTASLEIIRVDMNDAGNFTCRATNSVGSKDSSGALIVQEPPSFVTKPGSKDVLPGSAVCLKSTFQGSTPLTIRWFKGNKELVSGGSCYITKEALESSLELYLVKTSDSGTYTCKVSNVAGGVECSANLFVKEPATFVEKLEPSQLLKKGDATQLACKVTGTPPIKITWFANDREIKESSKHRMSFVESTAVLRLTDVGIEDSGEYMCEAQNEAGSDHCSSIVIVKESPYFTKEFKPIEVLKEYDVMLLAEVAGTPPFEITWFKDNTILRSGRKYKTFIQDHLVSLQILKFVAADAGEYQCRVTNEVGSSICSARVTLREPPSFIKKIESTSSLRGGTAAFQATLKGSLPITVTWLKDSDEITEDDNIRMTFENNVASLYLSGIEVKHDGKYVCQAKNDAGIQRCSALLSVKEPATITEEAVSIDVTQGDPATLQVKFSGTKEITAKWFKDGQELTLGSKYKISVTDTVSILKIISTEKKDSGEYTFEVQNDVGRSSCKARINVLDLIIPPSFTKKLKKMDSIKGSFIDLECIVAGSHPISIQWFKDDQEISASEKYKFSFHDNTAFLEISQLEGTDSGTYTCSATNKAGHNQCSGHLTVKEPPYFVEKPQSQDVNPNTRVQLKALVGGTAPMTIKWFKDNKELHSGAARSVWKDDTSTSLELFAAKATDSGTYICQLSNDVGTATSKATLFVKEPPQFIKKPSPVLVLRNGQSTTFECQITGTPKIRVSWYLDGNEITAIQKHGISFIDGLATFQISGARVENSGTYVCEARNDAGTASCSIELKVKEPPTFIRELKPVEVVKYSDVELECEVTGTPPFEVTWLKNNREIRSSKKYTLTDRVSVFNLHITKCDPSDTGEYQCIVSNEGGSCSCSTRVALKEPPSFIKKIENTTTVLKSSATFQSTVAGSPPISITWLKDDQILDEDDNVYISFVDSVATLQIRSVDNGHSGRYTCQAKNESGVERCYAFLLVQEPAQIVEKAKSVDVTEKDPMTLECVVAGTPELKVKWLKDGKQIVPSRYFSMSFENNVASFRIQSVMKQDSGQYTFKVENDFGSSSCDAYLRVLDQNIPPSFTKKLTKMDKVLGSSIHMECKVSGSLPISAQWFKDGKEISTSAKYRLVCHERSVSLEVNNLELEDTANYTCKVSNVAGDDACSGILTVKEPPSFLVKPGRQQAIPDSTVEFKAILKGTPPFKIKWFKDDVELVSGPKCFIGLEGSTSFLNLYSVDASKTGQYTCHVTNDVGSDSCTTMLLVTEPPKFVKKLEASKIVKAGDSSRLECKIAGSPEIRVVWFRNEHELPASDKYRMTFIDSVAVIQMNNLSTEDSGDFICEAQNPAGSTSCSTKVIVKEPPVFSSFPPIVETLKNAEVSLECELSGTPPFEVVWYKDKRQLRSSKKYKIASKNFHTSIHILNVDTSDIGEYHCKAQNEVGSDTCVCTVKLKEPPRFVSKLNSLTVVAGEPAELQASIEGAQPIFVQWLKEKEEVIRESENIRITFVENVATLQFAKAEPANAGKYICQIKNDGGMEENMATLMVLEPAVIVEKAGPMTVTVGETCTLECKVAGTPELSVEWYKDGKLLTSSQKHKFSFYNKISSLRILSVERQDAGTYTFQVQNNVGKSSCTAVVDVSDRAVPPSFTRRLKNTGGVLGASCILECKVAGSSPISVAWFHEKTKIVSGAKYQTTFSDNVCTLQLNSLDSSDMGNYTCVAANVAGSDECRAVLTVQEPPSFVKEPEPLEVLPGKNVTFTSVIRGTPPFKVNWFRGARELVKGDRCNIYFEDTVAELELFNIDISQSGEYTCVVSNNAGQASCTTRLFVKEPAAFLKRLSDHSVEPGKSIILESTYTGTLPISVTWKKDGFNITTSEKCNIVTTEKTCILEILNSTKRDAGQYSCEIENEAGRDVCGALVSTLEPPYFVTELEPLEAAVGDSVSLQCQVAGTPEITVSWYKGDTKLRPTPEYRTYFTNNVATLVFNKVNINDSGEYTCKAENSIGTASSKTVFRIQERQLPPSFARQLKDIEQTVGLPVTLTCRLNGSAPIQVCWYRDGVLLRDDENLQTSFVDNVATLKILQTDLSHSGQYSCSASNPLGTASSSARLTAREPKKSPFFDIKPVSIDVIAGESADFECHVTGAQPMRITWSKDNKEIRPGGNYTITCVGNTPHLRILKVGKGDSGQYTCQATNDVGKDMCSAQLSVKEPPKFVKKLEASKVAKQGESIQLECKISGSPEIKVSWFRNDSELHESWKYNMSFINSVALLTINEASAEDSGDYICEAHNGVGDASCSTALTVKAPPVFTQKPSPVGALKGSDVILQCEISGTPPFEVVWVKDRKQVRNSKKFKITSKHFDTSLHILNLEASDVGEYHCKATNEVGSDTCSCSVKFKEPPRFVKKLSDTSTLIGDAVELRAIVEGFQPISVVWLKDRGEVIRESENTRISFIDNIATLQLGSPEASNSGKYICQIKNDAGMRECSAVLTVLEPARIIEKPEPMTVTTGNPFALECVVTGTPELSAKWFKDGRELSADSKHHITFINKVASLKIPCAEMSDKGLYSFEVKNSVGKSNCTVSVHVSDRIVPPSFIRKLKDVNAILGASVVLECRVSGSAPISVGWFQDGNEIVSGPKCQSSFSENVCTLNLSLLEPSDTGIYTCVAANVAGSDECSAVLTVQEPPSFEQTPDSVEVLPGMSLTFTSVIRGTPPFKVKWFKGSRELVPGESCNISLEDFVTELELFEVQPLESGDYSCLVTNDAGSASCTTHLFVKEPATFVKRLADFSVETGSPIVLEATYTGTPPISVSWIKDEYLISQSERCSITMTEKSTILEILESTIEDYAQYSCLIENEAGQDICEALVSVLEPPYFIEPLEHVEAVIGEPATLQCKVDGTPEIRISWYKEHTKLRSAPAYKMQFKNNVASLVINKVDHSDVGEYSCKADNSVGAVASSAVLVIKERKLPPFFARKLKDVHETLGFPVAFECRINGSEPLQVSWYKDGVLLKDDANLQTSFVHNVATLQILQTDQSHIGQYNCSASNPLGTASSSAKLILSEHEVPPFFDLKPVSVDLALGESGTFKCHVTGTAPIKITWAKDNREIRPGGNYKMTLVENTATLTVLKVGKGDAGQYTCYASNIAGKDSCSAHLGVQEPPRFIKKLEPSRIVKQDEFTRYECKIGGSPEIKVLWYKDETEIQESSKFRMSFVDSVAVLEMHNLSVEDSGDYTCEAHNAAGSASSSTSLKVKEPPIFRKKPHPIETLKGADVHLECELQGTPPFHVSWYKDKRELRSGKKYKIMSENFLTSIHILNVDAADIGEYQCKATNDVGSDTCVGSIALKAPPRFVKKLSDISTVVGKEVQLQTTIEGAEPISVVWFKDKGEIVRESDNIWISYSENIATLQFSRVEPANAGKYTCQIKNDAGMQECFATLSVLEPATIVEKPESIKVTTGDTCTLECTVAGTPELSTKWFKDGKELTSDNKYKISFFNKVSGLKIINVAPSDSGVYSFEVQNPVGKDSCTASLQVSDRTVPPSFTRKLKETNGLSGSSVVMECKVYGSPPISVSWFHEGNEISSGRKYQTTLTDNTCALTVNMLEESDSGDYTCIATNMAGSDECSAPLTVREPPSFVQKPDPMDVLTGTNVTFTSIVKGTPPFSVSWFKGSSELVPGDRCNVSLEDSVAELELFDVDTSQSGEYTCIVSNEAGKASCTTHLYIKAPAKFVKRLNDYSIEKGKPLILEGTFTGTPPISVTWKKNGINVTPSQRCNITTTEKSAILEIPSSTVEDAGQYNCYIENASGKDSCSAQILILEPPYFVKQLEPVKVSVGDSASLQCQLAGTPEIGVSWYKGDTKLRPTTTYKMHFRNNVATLVFNQVDINDSGEYICKAENSVGEVSASTFLTVQEQKLPPSFSRQLRDVQETVGLPVVFDCAISGSEPISVSWYKDGKPLKDSPNVQTSFLDNTATLNIFKTDRSLAGQYSCTATNPIGSASSSARLILTEGKNPPFFDIRLAPVDAVVGESADFECHVTGTQPIKVSWAKDSREIRSGGKYQISYLENSAHLTVLKVDKGDSGQYTCYAVNEVGKDSCTAQLNIKERLIPPSFTKRLSETVEETEGNSFKLEGRVAGSQPITVAWYKNNIEIQPTSNCEITFKNNTLVLQVRKAGMNDAGLYTCKVSNDAGSALCTSSIVIKEPKKPPVFDQHLTPVTVSEGEYVQLSCHVQGSEPIRIQWLKAGREIKPSDRCSFSFASGTAVLELRDVAKADSGDYVCKASNVAGSDTTKSKVTIKDKPAVAPATKKAAVDGRLFFVSEPQSIRVVEKTTATFIAKVGGDPIPNVKWTKGKWRQLNQGGRVFIHQKGDEAKLEIRDTTKTDSGLYRCVAFNEHGEIESNVNLQVDERKKQEKIEGDLRAMLKKTPILKKGAGEEEEIDIMELLKNVDPKEYEKYARMYGITDFRGLLQAFELLKQSQEEETHRLEIEEIERSERDEKEFEELVSFIQQRLSQTEPVTLIKDIENQTVLKDNDAVFEIDIKINYPEIKLSWYKGTEKLEPSDKFEISIDGDRHTLRVKNCQLKDQGNYRLVCGPHIASAKLTVIEPAWERHLQDVTLKEGQTCTMTCQFSVPNVKSEWFRNGRILKPQGRHKTEVEHKVHKLTIADVRAEDQGQYTCKYEDLETSAELRIEAEPIQFTKRIQNIVVSEHQSATFECEVSFDDAIVTWYKGPTELTESQKYNFRNDGRCHYMTIHNVTPDDEGVYSVIARLEPRGEARSTAELYLTTKEIKLELKPPDIPDSRVPIPTMPIRAVPPEEIPPVVAPPIPLLLPTPEEKKPPPKRIEVTKKAVKKDAKKVVAKPKEMTPREEIVKKPPPPTTLIPAKAPEIIDVSSKAEEVKIMTITRKKEVQKEKEAVYEKKQAVHKEKRVFIESFEEPYDELEVEPYTEPFEQPYYEEPDEDYEEIKVEAKKEVHEEWEEDFEEGQEYYEREEGYDEGEEEWEEAYQEREVIQVQKEVYEESHERKVPAKVPEKKAPPPPKVIKKPVIEKIEKTSRRMEEEKVQVTKVPEVSKKIVPQKPSRTPVQEEVIEVKVPAVHTKKMVISEEKMFFASHTEEEVSVTVPEVQKEIVTEEKIHVAVSKRVEPPPKVPELPEKPAPEEVAPVPIPKKVEPPAPKVPEVPKKPVPEEKKPVPVPKKEPAAPPKVPEVPKKPVPEEKIPVPVAKKKEAPPAKVPEVQKRVVTEEKITIVTQREESPPPAVPEIPKKKVPEERKPVPRKEEEVPPPPKVPALPKKPVPEEKVAVPVPVAKKAPPPRAEVSKKTVVEEKRFVAEEKLSFAVPQRVEVTRHEVSAEEEWSYSEEEEGVSISVYREEEREEEEEAEVTEYEVMEEPEEYVVEEKLHIISKRVEAEPAEVTERQEKKIVLKPKIPAKIEEPPPAKVPEAPKKIVPEKKVPAPVPKKEKVPPPKVPEEPKKPVPEKKVPPKVIKMEEPLPAKVTERHMQITQEEKVLVAVTKKEAPPKARVPEEPKRAVPEEKVLKLKPKREEEPPAKVTEFRKRVVKEEKVSIEAPKREPQPIKEVTIMEEKERAYTLEEEAVSVQREEEYEEYEEYDYKEFEEYEPTEEYDQYEEYEEREYERYEEHEEYITEPEKPIPVKPVPEEPVPTKPKAPPAKVLKKAVPEEKVPVPIPKKLKPPPPKVPEEPKKVFEEKIRISITKREKEQVTEPAAKVPMKPKRVVAEEKVPVPRKEVAPPVRVPEVPKELEPEEVAFEEEVVTHVEEYLVEEEEEYIHEEEEFITEEEVVPVIPVKVPEVPRKPVPEEKKPVPVPKKKEAPPAKVPEVPKKPEEKVPVLIPKKEKPPPAKVPEVPKKPVPEEKVPVPVPKKVEAPPAKVPEVPKKPVPEKKVPVPAPKKVEAPPAKVPEVPKKLIPEEKKPTPVPKKVEAPPPKVPKKREPVPVPVALPQEEEVLFEEEIVPEEEVLPEEEEVLPEEEEVLPEEEEVLPEEEEIPPEEEEVPPEEEYVPEEEEFVPEEEVLPEVKPKVPVPAPVPEIKKKVTEKKVVIPKKEEAPPAKVPEVPKKVEEKRIILPKEEEVLPVEVTEEPEEEPISEEEIPEEPPSIEEVEEVAPPRVPEVIKKAVPEAPTPVPKKVEAPPAKVSKKIPEEKVPVPVQKKEAPPAKVPEVPKKVPEKKVLVPKKEAVPPAKGRTVLEEKVSVAFRQEVVVKERLELEVVEAEVEEIPEEEEFHEVEEYFEEGEFHEVEEFIKLEQHRVEEEHRVEKVHRVIEVFEAEEVEVFEKPKAPPKGPEISEKIIPPKKPPTKVVPRKEPPAKVPEVPKKIVVEEKVRVPEEPRVPPTKVPDVLPPKEVVPEKKVPVPPAKKPEAPPPKVPEAPKEVVPEKKVPVPPPKKPEVPPTKVPEVPKAAVPEKKVPEAIPPKPESPPPEVPEAPKEVVPEKKVPAAPPKKPEVTPVKVPEAPKEVVPEKKVPVPPPKKPEVPPTKVPEVPKVAVPEKKVPEAIPPKPESPPPEVFEEPEEVALEEPPAEVVEEPEPAAPPQVTVPPKKPVPEKKAPAVVAKKPELPPVKVPEVPKEVVPEKKVPLVVPKKPEAPPAKVPEVPKEVVPEKKVAVPKKPEVPPAKVPEVPKKPVLEEKPAVPVPERAESPPPEVYEEPEEIAPEEEIAPEEEKPVPVAEEEEPEVPPPAVPEEPKKIIPEKKVPVIKKPEAPPPKEPEPEKVIEKPKLKPRPPPPPPAPPKEDVKEKIFQLKAIPKKKVPEKPQVPEKVELTPLKVPGGEKKVRKLLPERKPEPKEEVVLKSVLRKRPEEEEPKVEPKKLEKVKKPAVPEPPPPKPVEEVEVPTVTKRERKIPEPTKVPEIKPAIPLPAPEPKPKPEAEVKTIKPPPVEPEPTPIAAPVTVPVVGKKAEAKAPKEEAAKPKGPIKGVPKKTPSPIEAERRKLRPGSGGEKPPDEAPFTYQLKAVPLKFVKEIKDIILTESEFVGSSAIFECLVSPSTAITTWMKDGSNIRESPKHRFIADGKDRKLHIIDVQLSDAGEYTCVLRLGNKEKTSTAKLVVEELPVRFVKTLEEEVTVVKGQPLYLSCELNKERDVVWRKDGKIVVEKPGRIVPGVIGLMRALTINDADDTDAGTYTVTVENANNLECSSCVKVVEVIRDWLVKPIRDQHVKPKGTAIFACDIAKDTPNIKWFKGYDEIPAEPNDKTEILRDGNHLYLKIKNAMPEDIAEYAVEIEGKRYPAKLTLGEREVELLKPIEDVTIYEKESASFDAEISEADIPGQWKLKGELLRPSPTCEIKAEGGKRFLTLRKVKLDQAGEVLYQALNAITTAILTVKEIELDFAVPLKDVTVPERRQARFECVLTREANVIWSKGPDIIKSSDKFDIIADGKKHILVINDSQFDDEGVYTAEVEGKKTSARLFVTGIRLKFMSPLEDQTVKEGETATFVCELSHEKMHVVWFKNDAKLHTSRTVLISSEGKTHKLEMKEVTLDDISQIKAQVKELSSTAQLKVLEADPYFTVKLHDKTAVEKDEITLKCEVSKDVPVKWFKDGEEIVPSPKYSIKADGLRRILKIKKADLKDKGEYVCDCGTDKTKANVTVEARLIKVEKPLYGVEVFVGETAHFEIELSEPDVHGQWKLKGQPLTASPDCEIIEDGKKHILILHNCQLGMTGEVSFQAANAKSAANLKVKELPLIFITPLSDVKVFEKDEAKFECEVSREPKTFRWLKGTQEITGDDRFELIKDGTKHSMVIKSAAFEDEAKYMFEAEDKHTSGKLIIEGIRLKFLTPLKDVTAKEKESAVFTVELSHDNIRVKWFKNDQRLHTTRSVSMQDEGKTHSITFKDLSIDDTSQIRVEAMGMSSEAKLTVLEGDPYFTGKLQDYTGVEKDEVILQCEISKADAPVKWFKDGKEIKPSKNAVIKADGKKRMLILKKALKSDIGQYTCDCGTDKTSGKLDIEDREIKLVRPLHSVEVMETETARFETEISEDDIHANWKLKGEALLQTPDCEIKEEGKIHSLVLHNCRLDQTGGVDFQAANVKSSAHLRVKPRVIGLLRPLKDVTVTAGETATFDCELSYEDIPVEWYLKGKKLEPSDKVVPRSEGKVHTLTLRDVKLEDAGEVQLTAKDFKTHANLFVKEPPVEFTKPLEDQTVEEGATAVLECEVSRENAKVKWFKNGTEILKSKKYEIVADGRVRKLVIHDCTPEDIKTYTCDAKDFKTSCNLNVVPPHVEFLRPLTDLQVREKEMARFECELSRENAKVKWFKDGAEIKKGKKYDIISKGAVRILVINKCLLDDEAEYSCEVRTARTSGMLTVLEEEAVFTKNLANIEVSETDTIKLVCEVSKPGAEVIWYKGDEEIIETGRYEILTEGRKRILVIQNAHLEDAGNYNCRLPSSRTDGKVKVHELAAEFISKPQNLEILEGEKAEFVCSISKESFPVQWKRDDKTLESGDKYDVIADGKKRVLVVKDATLQDMGTYVVMVGAARAAAHLTVIEKLRIVVPLKDTRVKEQQEVVFNCEVNTEGAKAKWFRNEEAIFDSSKYIILQKDLVYTLRIRDAHLDDQANYNVSLTNHRGENVKSAANLIVEEEDLRIVEPLKDIETMEKKSVTFWCKVNRLNVTLKWTKNGEEVPFDNRVSYRVDKYKHMLTIKDCGFPDEGEYIVTAGQDKSVAELLIIEAPTEFVEHLEDQTVTEFDDAVFSCQLSREKANVKWYRNGREIKEGKKYKFEKDGSIHRLIIKDCRLDDECEYACGVEDRKSRARLFVEEIPVEIIRPPQDILEAPGADVVFLAELNKDKVEVQWLRNNMVVVQGDKHQMMSEGKIHRLQICDIKPRDQGEYRFIAKDKEARAKLELAAAPKIKTADQDLVVDVGKPLTMVVPYDAYPKAEAEWFKENEPLSTKTIDTTAEQTSFRILEAKKGDKGRYKIVLQNKHGKAEGFINLKVIDVPGPVRNLEVTETFDGEVSLAWEEPLTDGGSKIIGYVVERRDIKRKTWVLATDRAESCEFTVTGLQKGGVEYLFRVSARNRVGTGEPVETDNPVEARSKYDVPGPPLNVTITDVNRFGVSLTWEPPEYDGGAEITNYVIELRDKTSIRWDTAMTVRAEDLSATVTDVVEGQEYSFRVRAQNRIGVGKPSAATPFVKVADPIERPSPPVNLTSSDQTQSSVQLKWEPPLKDGGSPILGYIIERCEEGKDNWIRCNMKLVPELTYKVTGLEKGNKYLYRVSAENKAGVSDPSEILGPLTADDAFVEPTMDLSAFKDGLEVIVPNPITILVPSTGYPRPTATWCFGDKVLETGDRVKMKTLSAYAELVISPSERSDKGIYTLKLENRVKTISGEIDVNVIARPSAPKELKFGDITKDSVHLTWEPPDDDGGSPLTGYVVEKREVSRKTWTKVMDFVTDLEFTVPDLVQGKEYLFKVCARNKCGPGEPAYVDEPVNMSTPATVPDPPENVKWRDRTANSIFLTWDPPKNDGGSRIKGYIVERCPRGSDKWVACGEPVAETKMEVTGLEEGKWYAYRVKALNRQGASKPSRPTEEIQAVDTQEAPEIFLDVKLLAGLTVKAGTKIELPATVTGKPEPKITWTKADMILKQDKRITIENVPKKSTVTIVDSKRSDTGTYIIEAVNVCGRATAVVEVNVLDKPGPPAAFDITDVTNESCLLTWNPPRDDGGSKITNYVVERRATDSEVWHKLSSTVKDTNFKATKLIPNKEYIFRVAAENMYGVGEPVQASPITAKYQFDPPGPPTRLEPSDITKDAVTLTWCEPDDDGGSPITGYWVERLDPDTDKWVRCNKMPVKDTTYRVKGLTNKKKYRFRVLAENLAGPGKPSKSTEPILIKDPIDPPWPPGKPTVKDVGKTSVRLNWTKPEHDGGAKIESYVIEMLKTGTDEWVRVAEGVPTTQHLLPGLMEGQEYSFRVRAVNKAGESEPSEPSDPVLCREKLYPPSPPRWLEVINITKNTADLKWTVPEKDGGSPITNYIVEKRDVRRKGWQTVDTTVKDTKCTVTPLTEGSLYVFRVAAENAIGQSDYTEIEDSVLAKDTFTTPGPPYALAVVDVTKRHVDLKWEPPKNDGGRPIQRYVIEKKERLGTRWVKAGKTAGPDCNFRVTDVIEGTEVQFQVRAENEAGVGHPSEPTEILSIEDPTSPPSPPLDLHVTDAGRKHIAIAWKPPEKNGGSPIIGYHVEMCPVGTEKWMRVNSRPIKDLKFKVEEGVVPDKEYVLRVRAVNAIGVSEPSEISENVVAKDPDCKPTIDLETHDIIVIEGEKLSIPVPFRAVPVPTVSWHKDGKEVKASDRLTMKNDHISAHLEVPKSVRADAGIYTITLENKLGSATASINVKVIGLPGPCKDIKASDITKSSCKLTWEPPEFDGGTPILHYVLERREAGRRTYIPVMSGENKLSWTVKDLIPNGEYFFRVKAVNKVGGGEYIELKNPVIAQDPKQPPDPPVDVEVHNPTAEAMTITWKPPLYDGGSKIMGYIIEKIAKGEERWKRCNEHLVPILTYTAKGLEEGKEYQFRVRAENAAGISEPSRATPPTKAVDPIDAPKVILRTSLEVKRGDEIALDASISGSPYPTITWIKDENVIVPEEIKKRAAPLVRRRKGEVQEEEPFVLPLTQRLSIDNSKKGESQLRVRDSLRPDHGLYMIKVENDHGIAKAPCTVSVLDTPGPPINFVFEDIRKTSVLCKWEPPLDDGGSEIINYTLEKKDKTKPDSEWIVVTSTLRHCKYSVTKLIEGKEYLFRVRAENRFGPGPPCVSKPLVAKDPFGPPDAPDKPIVEDVTSNSMLVKWNEPKDNGSPILGYWLEKREVNSTHWSRVNKSLLNALKANVDGLLEGLTYVFRVCAENAAGPGKFSPPSDPKTAHDPISPPGPPIPRVTDTSSTTIELEWEPPAFNGGGEIVGYFVDKQLVGTNEWSRCTEKMIKVRQYTVKEIREGADYKLRVSAVNAAGEGPPGETQPVTVAEPQEPPAVELDVSVKGGIQIMAGKTLRIPAVVTGRPVPTKVWTKEEGELDKDRVVIDNVGTKSELIIKDALRKDHGRYVITATNSCGSKFAAARVEVFDVPGPVLDLKPVVTNRKMCLLNWSDPEDDGGSEITGFIIERKDAKMHTWRQPIETERSKCDITGLLEGQEYKFRVIAKNKFGCGPPVEIGPILAVDPLGPPTSPERLTYTERTKSTITLDWKEPRSNGGSPIQGYIIEKRRHDKPDFERVNKRLCPTTSFLVENLDEHQMYEFRVKAVNEIGESEPSLPLNVVIQDDEVPPTIKLRLSVRGDTIKVKAGEPVHIPADVTGLPMPKIEWSKNETVIEKPTDALQITKEEVSRSEAKTELSIPKAVREDKGTYTVTASNRLGSVFRNVHVEVYDRPSPPRNLAVTDIKAESCYLTWDAPLDNGGSEITHYVIDKRDASRKKAEWEEVTNTAVEKRYGIWKLIPNGQYEFRVRAVNKYGISDECKSDKVVIQDPYRLPGPPGKPKVLARTKGSMLVSWTPPLDNGGSPITGYWLEKREEGSPYWSRVSRAPITKVGLKGVEFNVPRLLEGVKYQFRAMAINAAGIGPPSEPSDPEVAGDPIFPPGPPSCPEVKDKTKSSISLGWKPPAKDGGSPIKGYIVEMQEEGTTDWKRVNEPDKLITTCECVVPNLKELRKYRFRVKAVNEAGESEPSDTTGEIPATDIQEEPEVFIDIGAQDCLVCKAGSQIRIPAVIKGRPTPKSSWEFDGKAKKAMKDGVHDIPEDAQLETAENSSVIIIPECKRSHTGKYSITAKNKAGQKTANCRVKVMDVPGPPKDLKVSDITRGSCRLSWKMPDDDGGDRIKGYVIEKRTIDGKAWTKVNPDCGSTTFVVPDLLSEQQYFFRVRAENRFGIGPPVETIQRTTARDPIYPPDPPIKLKIGLITKNTVHLSWKPPKNDGGSPVTHYIVECLAWDPTGTKKEAWRQCNKRDVEELQFTVEDLVEGGEYEFRVKAVNAAGVSKPSATVGPCDCQRPDMPPSIDLKEFMEVEEGTNVNIVAKIKGVPFPTLTWFKAPPKKPDNKEPVLYDTHVNKLVVDDTCTLVIPQSRRSDTGLYTITAVNNLGTASKEMRLNVLGRPGPPVGPIKFESVSADQMTLSWFPPKDDGGSKITNYVIEKREANRKTWVHVSSEPKECTYTIPKLLEGHEYVFRIMAQNKYGIGEPLDSEPETARNLFSVPGAPDKPTVSSVTRNSMTVNWEEPEYDGGSPVTGYWLEMKDTTSKRWKRVNRDPIKAMTLGVSYKVTGLIEGSDYQFRVYAINAAGVGPASLPSDPATARDPIAPPGPPFPKVTDWTKSSADLEWSPPLKDGGSKVTGYIVEYKEEGKEEWEKGKDKEVRGTKLVVTGLKEGAFYKFRVSAVNIAGIGEPGEVTDVIEMKDRLVSPDLQLDASVRDRIVVHAGGVIRIIAYVSGKPPPTVTWNMNERTLPQEATIETTAISSSMVIKNCQRSHQGVYSLLAKNEAGERKKTIIVDVLDVPGPVGTPFLAHNLTNESCKLTWFSPEDDGGSPITNYVIEKRESDRRAWTPVTYTVTRQNATVQGLIQGKAYFFRIAAENSIGMGPFVETSEALVIREPITVPERPEDLEVKEVTKNTVTLTWNPPKYDGGSEIINYVLESRLIGTEKFHKVTNDNLLSRKYTVKGLKEGDTYEYRVSAVNIVGQGKPSFCTKPITCKDELAPPTLHLDFRDKLTIRVGEAFALTGRYSGKPKPKVSWFKDEADVLEDDRTHIKTTPATLALEKIKAKRSDSGKYCVVVENSTGSRKGFCQVNVVDRPGPPVGPVSFDEVTKDYMVISWKPPLDDGGSKITNYIIEKKEVGKDVWMPVTSASAKTTCKVSKLLEGKDYIFRIHAENLYGISDPLVSDSMKAKDRFRVPDAPDQPIVTEVTKDSALVTWNKPHDGGKPITNYILEKRETMSKRWARVTKDPIHPYTKFRVPDLLEGCQYEFRVSAENEIGIGDPSPPSKPVFAKDPIAKPSPPVNPEAIDTTCNSVDLTWQPPRHDGGSKILGYIVEYQKVGDEEWRRANHTPESCPETKYKVTGLRDGQTYKFRVLAVNAAGESDPAHVPEPVLVKDRLEPPELILDANMAREQHIKVGDTLRLSAIIKGVPFPKVTWKKEDRDAPTKARIDVTPVGSKLEIRNAAHEDGGIYSLTVENPAGSKTVSVKVLVLDKPGPPRDLEVSEIRKDSCYLTWKEPLDDGGSVITNYVVERRDVASAQWSPLSATSKKKSHFAKHLNEGNQYLFRVAAENQYGRGPFVETPKPIKALDPLHPPGPPKDLHHVDVDKTEVSLVWNKPDRDGGSPITGYLVEYQEEGTQDWIKFKTVTNLECVVTGLQQGKTYRFRVKAENIVGLGLPDTTIPIECQEKLVPPSVELDVKLIEGLVVKAGTTVRFPAIIRGVPVPTAKWTTDGSEIKTDEHYTVETDNFSSVLTIKNCLRRDTGEYQITVSNAAGSKTVAVHLTVLDVPGPPTGPINILDVTPEHMTISWQPPKDDGGSPVINYIVEKQDTRKDTWGVVSSGSSKTKLKIPHLQKGCEYVFRVRAENKIGVGPPLDSTPTVAKHKFSPPSPPGKPVVTDITENAATVSWTLPKSDGGSPITGYYMERREVTGKWVRVNKTPIADLKFRVTGLYEGNTYEFRVFAENLAGLSKPSPSSDPIKACRPIKPPGPPINPKLKDKSRETADLVWTKPLSDGGSPILGYVVECQKPGTAQWNRINKDELIRQCAFRVPGLIEGNEYRFRIKAANIVGEGEPRELAESVIAKDILHPPEVELDVTCRDVITVRVGQTIRILARVKGRPEPDITWTKEGKVLVREKRVDLIQDLPRVELQIKEAVRADHGKYIISAKNSSGHAQGSAIVNVLDRPGPCQNLKVTNVTKENCTISWENPLDNGGSEITNFIVEYRKPNQKGWSIVASDVTKRLIKANLLANNEYYFRVCAENKVGVGPTIETKTPILAINPIDRPGEPENLHIADKGKTFVYLKWRRPDYDGGSPNLSYHVERRLKGSDDWERVHKGSIKETHYMVDRCVENQIYEFRVQTKNEGGESDWVKTEEVVVKEDLQKPVLDLKLSGVLTVKAGDTIRLEAGVRGKPFPEVAWTKDKDATDLTRSPRVKIDTRADSSKFSLTKAKRSDGGKYVVTATNTAGSFVAYATVNVLDKPGPVRNLKIVDVSSDRCTVCWDPPEDDGGCEIQNYILEKCETKRMVWSTYSATVLTPGTTVTRLIEGNEYIFRVRAENKIGTGPPTESKPVIAKTKYDKPGRPDPPEVTKVSKEEMTVVWNPPEYDGGKSITGYFLEKKEKHSTRWVPVNKSAIPERRMKVQNLLPDHEYQFRVKAENEIGIGEPSLPSRPVVAKDPIEPPGPPTNFRVVDTTKHSITLGWGKPVYDGGAPIIGYVVEMRPKIADASPDEGWKRCNAAAQLVRKEFTVTSLDENQEYEFRVCAQNQVGIGRPAELKEAIKPKEILEPPEIDLDASMRKLVIVRAGCPIRLFAIVRGRPAPKVTWRKVGIDNVVRKGQVDLVDTMAFLVIPNSTRDDSGKYSLTLVNPAGEKAVFVNVRVLDTPGPVSDLKVSDVTKTSCHVSWAPPENDGGSQVTHYIVEKREADRKTWSTVTPEVKKTSFHVTNLVPGNEYYFRVTAVNEYGPGVPTDVPKPVLASDPLSEPDPPRKLEVTEMTKNSATLAWLPPLRDGGAKIDGYITSYREEEQPADRWTEYSVVKDLSLVVTGLKEGKKYKFRVAARNAVGVSLPREAEGVYEAKEQLLPPKILMPEQITIKAGKKLRIEAHVYGKPHPTCKWKKGEDEVVTSSHLAVHKADSSSILIIKDVTRKDSGYYSLTAENSSGTDTQKIKVVVMDAPGPPQPPFDISDIDADACSLSWHIPLEDGGSNITNYIVEKCDVSRGDWVTALASVTKTSCRVGKLIPGQEYIFRVRAENRFGISEPLTSPKMVAQFPFGVPSEPKNARVTKVNKDCIFVAWDRPDSDGGSPIIGYLIERKERNSLLWVKANDTLVRSTEYPCAGLVEGLEYSFRIYALNKAGSSPPSKPTEYVTARMPVDPPGKPEVIDVTKSTVSLIWARPKHDGGSKIIGYFVEACKLPGDKWVRCNTAPHQIPQEEYTATGLEEKAQYQFRAIARTAVNISPPSEPSDPVTILAENVPPRIDLSVAMKSLLTVKAGTNVCLDATVFGKPMPTVSWKKDGTLLKPAEGIKMAMQRNLCTLELFSVNRKDSGDYTITAENSSGSKSATIKLKVLDKPGPPASVKINKMYSDRAMLSWEPPLEDGGSEITNYIVDKRETSRPNWAQVSATVPITSCSVEKLIEGHEYQFRICAENKYGVGDPVFTEPAIAKNPYDPPGRCDPPVISNITKDHMTVSWKPPADDGGSPITGYLLEKRETQAVNWTKVNRKPIIERTLKATGLQEGTEYEFRVTAINKAGPGKPSDASKAAYARDPQYPPAPPAFPKVYDTTRSSVSLSWGKPAYDGGSPIIGYLVEVKRADSDNWVRCNLPQNLQKTRFEVTGLMEDTQYQFRVYAVNKIGYSDPSDVPDKHYPKDILIPPEGELDADLRKTLILRAGVTMRLYVPVKGRPPPKITWSKPNVNLRDRIGLDIKSTDFDTFLRCENVNKYDAGKYILTLENSCGKKEYTIVVKVLDTPGPPVNVTVKEISKDSAYVTWEPPIIDGGSPIINYVVQKRDAERKSWSTVTTECSKTSFRVANLEEGKSYFFRVFAENEYGIGDPGETRDAVKASQTPGPVVDLKVRSVSKSSCSIGWKKPHSDGGSRIIGYVVDFLTEENKWQRVMKSLSLQYSAKDLTEGKEYTFRVSAENENGEGTPSEITVVARDDVVAPDLDLKGLPDLCYLAKENSNFRLKIPIKGKPAPSVSWKKGEDPLATDTRVSVESSAVNTTLIVYDCQKSDAGKYTITLKNVAGTKEGTISIKVVGKPGIPTGPIKFDEVTAEAMTLKWAPPKDDGGSEITNYILEKRDSVNNKWVTCASAVQKTTFRVTRLHEGMEYTFRVSAENKYGVGEGLKSEPIVARHPFDVPDAPPPPNIVDVRHDSVSLTWTDPKKTGGSPITGYHLEFKERNSLLWKRANKTPIRMRDFKVTGLTEGLEYEFRVMAINLAGVGKPSLPSEPVVALDPIDPPGKPEVINITRNSVTLIWTEPKYDGGHKLTGYIVEKRDLPSKSWMKANHVNVPECAFTVTDLVEGGKYEFRIRAKNTAGAISAPSESTETIICKDEYEAPTIVLDPTIKDGLTIKAGDTIVLNAISILGKPLPKSSWSKAGKDIRPSDITQITSTPTSSMLTIKYATRKDAGEYTITATNPFGTKVEHVKVTVLDVPGPPGPVEISNVSAEKATLTWTPPLEDGGSPIKSYILEKRETSRLLWTVVSEDIQSCRHVATKLIQGNEYIFRVSAVNHYGKGEPVQSEPVKMVDRFGPPGPPEKPEVSNVTKNTATVSWKRPVDDGGSEITGYHVERREKKSLRWVRAIKTPVSDLRCKVTGLQEGSTYEFRVSAENRAGIGPPSEASDSVLMKDAAYPPGPPSNPHVTDTTKKSASLAWGKPHYDGGLEITGYVVEHQKVGDEAWIKDTTGTALRITQFVVPDLQTKEKYNFRISAINDAGVGEPAVIPDVEIVEREMAPDFELDAELRRTLVVRAGLSIRIFVPIKGRPAPEVTWTKDNINLKNRANIENTESFTLLIIPECNRYDTGKFVMTIENPAGKKSGFVNVRVLDTPGPVLNLRPTDITKDSVTLHWDLPLIDGGSRITNYIVEKREATRKSYSTATTKCHKCTYKVTGLSEGCEYFFRVMAENEYGIGEPTETTEPVKASEAPSPPDSLNIMDITKSTVSLAWPKPKHDGGSKITGYVIEAQRKGSDQWTHITTVKGLECVVRNLTEGEEYTFQVMAVNSAGRSAPRESRPVIVKEQTMLPELDLRGIYQKLVIAKAGDNIKVEIPVLGRPKPTVTWKKGDQILKQTQRVNFETTATSTILNINECVRSDSGPYPLTARNIVGEVGDVITIQVHDIPGPPTGPIKFDEVSSDFVTFSWDPPENDGGVPISNYVVEMRQTDSTTWVELATTVIRTTYKATRLTTGLEYQFRVKAQNRYGVGPGITSACIVANYPFKVPGPPGTPQVTAVTKDSMTISWHEPLSDGGSPILGYHVERKERNGILWQTVSKALVPGNIFKSSGLTDGIAYEFRVIAENMAGKSKPSKPSEPMLALDPIDPPGKPVPLNITRHTVTLKWAKPEYTGGFKITSYIVEKRDLPNGRWLKANFSNILENEFTVSGLTEDAAYEFRVIAKNAAGAISPPSEPSDAITCRDDVEAPKIKVDVKFKDTVILKAGEAFRLEADVSGRPPPTMEWSKDGKELEGTAKLEIKIADFSTNLVNKDSTRRDSGAYTLTATNPGGFAKHIFNVKVLDRPGPPEGPLAVTEVTSEKCVLSWFPPLDDGGAKIDHYIVQKRETSRLAWTNVASEVQVTKLKVTKLLKGNEYIFRVMAVNKYGVGEPLESEPVLAVNPYGPPDPPKNPEVTTITKDSMVVCWGHPDSDGGSEIINYIVERRDKAGQRWIKCNKKTLTDLRYKVSGLTEGHEYEFRIMAENAAGISAPSPTSPFYKACDTVFKPGPPGNPRVLDTSRSSISIAWNKPIYDGGSEITGYMVEIALPEEDEWQIVTPPAGLKATSYTITGLTENQEYKIRIYAMNSEGLGEPALVPGTPKAEDRMLPPEIELDADLRKVVTIRACCTLRLFVPIKGRPAPEVKWARDHGESLDKASIESTSSYTLLIVGNVNRFDSGKYILTVENSSGSKSAFVNVRVLDTPGPPQDLKVKEVTKTSVTLTWDPPLLDGGSKIKNYIVEKRESTRKAYSTVATNCHKTSWKVDQLQEGCSYYFRVLAENEYGIGLPAETAESVKASERPLPPGKITLMDVTRNSVSLSWEKPEHDGGSRILGYIVEMQTKGSDKWATCATVKVTEATITGLIQGEEYSFRVSAQNEKGISDPRQLSVPVIAKDLVIPPAFKLLFNTFTVLAGEDLKVDVPFIGRPTPAVTWHKDNVPLKQTTRVNAESTENNSLLTIKDACREDVGHYVVKLTNSAGEAIETLNVIVLDKPGPPTGPVKMDEVTADSITLSWGPPKYDGGSSINNYIVEKRDTSTTTWQIVSATVARTTIKACRLKTGCEYQFRIAAENRYGKSTYLNSEPTVAQYPFKVPGPPGTPVVTLSSRDSMEVQWNEPISDGGSRVIGYHLERKERNSILWVKLNKTPIPQTKFKTTGLEEGVEYEFRVSAENIVGIGKPSKVSECYVARDPCDPPGRPEAIIVTRNSVTLQWKKPTYDGGSKITGYIVEKKELPEGRWMKASFTNIIDTHFEVTGLVEDHRYEFRVIARNAAGVFSEPSESTGAITARDEVDPPRISMDPKYKDTIVVHAGESFKVDADIYGKPIPTIQWIKGDQELSNTARLEIKSTDFATSLSVKDAVRVDSGNYILKAKNVAGERSVTVNVKVLDRPGPPEGPVVISGVTAEKCTLAWKPPLQDGGSDIINYIVERRETSRLVWTVVDANVQTLSCKVTKLLEGNEYTFRIMAVNKYGVGEPLESEPVVAKNPFVVPDAPKAPEVTTVTKDSMIVVWERPASDGGSEILGYVLEKRDKEGIRWTRCHKRLIGELRLRVTGLIENHDYEFRVSAENAAGLSEPSPPSAYQKACDPIYKPGPPNNPKVIDITRSSVFLSWSKPIYDGGCEIQGYIVEKCDVSVGEWTMCTPPTGINKTNIEVEKLLEKHEYNFRICAINKAGVGEHADVPGPIIVEEKLEAPDIDLDLELRKIINIRAGGSLRLFVPIKGRPTPEVKWGKVDGEIRDAAIIDVTSSFTSLVLDNVNRYDSGKYTLTLENSSGTKSAFVTVRVLDTPSPPVNLKVTEITKDSVSITWEPPLLDGGSKIKNYIVEKREATRKSYAAVVTNCHKNSWKIDQLQEGCSYYFRVTAENEYGIGLPAQTADPIKVAEVPQPPGKITVDDVTRNSVSLSWTKPEHDGGSKIIQYIVEMQAKHSEKWSECARVKSLQAVITNLTQGEEYLFRVVAVNEKGRSDPRSLAVPIVAKDLVIEPDVKPAFSSYSVQVGQDLKIEVPISGRPKPTITWTKDGLPLKQTTRINVTDSLDLTTLSIKETHKDDGGQYGITVANVVGQKTASIEIVTLDKPDPPKGPVKFDDVSAESITLSWNPPLYTGGCQITNYIVQKRDTTTTVWDVVSATVARTTLKVTKLKTGTEYQFRIFAENRYGQSFALESDPIVAQYPYKEPGPPGTPFATAISKDSMVIQWHEPVNNGGSPVIGYHLERKERNSILWTKVNKTIIHDTQFKAQNLEEGIEYEFRVYAENIVGVGKASKNSECYVARDPCDPPGTPEPIMVKRNEITLQWTKPVYDGGSMITGYIVEKRDLPDGRWMKASFTNVIETQFTVSGLTEDQRYEFRVIAKNAAGAISKPSDSTGPITAKDEVELPRISMDPKFRDTIVVNAGETFRLEADVHGKPLPTIEWLRGDKEIEESARCEIKNTDFKALLIVKDAIRIDGGQYILRASNVAGSKSFPVNVKVLDRPGPPEGPVQVTGVTSEKCSLTWSPPLQDGGSDISHYVVEKRETSRLAWTVVASEVVTNSLKVTKLLEGNEYVFRIMAVNKYGVGEPLESAPVLMKNPFVLPGPPKSLEVTNIAKDSMTVCWNRPDSDGGSEIIGYIVEKRDRSGIRWIKCNKRRITDLRLRVTGLTEDHEYEFRVSAENAAGVGEPSPATVYYKACDPVFKPGPPTNAHIVDTTKNSITLAWGKPIYDGGSEILGYVVEICKADEEEWQIVTPQTGLRVTRFEISKLTEHQEYKIRVCALNKVGLGEATSVPGTVKPEDKLEAPELDLDSELRKGIVVRAGGSARIHIPFKGRPTPEITWSREEGEFTDKVQIEKGVNYTQLSIDNCDRNDAGKYILKLENSSGSKSAFVTVKVLDTPGPPQNLAVKEVRKDSAFLVWEPPIIDGGAKVKNYVIDKRESTRKAYANVSSKCSKTSFKVENLTEGAIYYFRVMAENEFGVGVPVETVDAVKAAEPPSPPGKVTLTDVSQTSASLMWEKPEHDGGSRVLGYVVEMQPKGTEKWSIVAESKVCNAVVTGLSSGQEYQFRVKAYNEKGKSDPRVLGVPVIAKDLTIQPSLKLPFNTYSIQAGEDLKIEIPVIGRPRPNISWVKDGEPLKQTTRVNVEETATSTVLHIKEGNKDDFGKYTVTATNSAGTATENLSVIVLEKPGPPVGPVRFDEVSADFVVISWEPPAYTGGCQISNYIVEKRDTTTTTWHMVSATVARTTIKITKLKTGTEYQFRIFAENRYGKSAPLDSKAVIVQYPFKEPGPPGTPFVTSISKDQMLVQWHEPVNDGGTKIIGYHLEQKEKNSILWVKLNKTPIQDTKFKTTGLDEGLEYEFKVSAENIVGIGKPSKVSECFVARDPCDPPGRPEAIVITRNNVTLKWKKPAYDGGSKITGYIVEKKDLPDGRWMKASFTNVLETEFTVSGLVEDQRYEFRVIARNAAGNFSEPSDSSGAITARDEIDAPNASLDPKYKDVIVVHAGETFVLEADIRGKPIPDVVWSKDGKELEETAARMEIKSTIQKTTLVVKDCIRTDGGQYILKLSNVGGTKSIPITVKVLDRPGPPEGPLKVTGVTAEKCYLAWNPPLQDGGANISHYIIEKRETSRLSWTQVSTEVQALNYKVTKLLPGNEYIFRVMAVNKYGIGEPLESGPVTACNPYKPPGPPSTPEVSAITKDSMVVTWARPVDDGGTEIEGYILEKRDKEGVRWTKCNKKTLTDLRLRVTGLTEGHSYEFRVAAENAAGVGEPSEPSVFYRACDALYPPGPPSNPKVTDTSRSSVSLAWSKPIYDGGAPVKGYVVEVKEAAADEWTTCTPPTGLQGKQFTVTKLKENTEYNFRICAINSEGVGEPATLPGSVVAQERIEPPEIELDADLRKVVVLRASATLRLFVTIKGRPEPEVKWEKAEGILTDRAQIEVTSSFTMLVIDNVTRFDSGRYNLTLENNSGSKTAFVNVRVLDSPSAPVNLTIREVKKDSVTLSWEPPLIDGGAKITNYIVEKRETTRKAYATITNNCTKTTFRIENLQEGCSYYFRVLASNEYGIGLPAETTEPVKVSEPPLPPGRVTLVDVTRNTATIKWEKPESDGGSKITGYVVEMQTKGSEKWSTCTQVKTLEATISGLTAGEEYVFRVAAVNEKGRSDPRQLGVPVIARDIEIKPSVELPFHTFNVKAREQLKIDVPFKGRPQATVNWRKDGQTLKETTRVNVSSSKTVTSLSIKEASKEDVGTYELCVSNSAGSITVPITIIVLDRPGPPGPIRIDEVSCDSITISWNPPEYDGGCQISNYIVEKKETTSTTWHIVSQAVARTSIKIVRLTTGSEYQFRVCAENRYGKSSYSESSAVVAEYPFSPPGPPGTPKVVHATKSTMLVTWQVPVNDGGSRVIGYHLEYKERSSILWSKANKILIADTQMKVSGLDEGLMYEYRVYAENIAGIGKCSKSCEPVPARDPCDPPGQPEVTNITRKSVSLKWSKPHYDGGAKITGYIVERRELPDGRWLKCNYTNIQETYFEVTELTEDQRYEFRVFARNAADSVSEPSESTGPIIVKDDVEPPRVMMDVKFRDVIVVKAGEVLKINADIAGRPLPVISWAKDGIEIEERARTEIISTDNHTLLTVKDCIRRDTGQYVLTLKNVAGTRSVAVNCKVLDKPGPPAGPLEINGLTAEKCSLSWGRPQEDGGADIDYYIVEKRETSHLAWTICEGELQMTSCKVTKLLKGNEYIFRVTGVNKYGVGEPLESVAIKALDPFTVPSPPTSLEITSVTKESMTLCWSRPESDGGSEISGYIIERREKNSLRWVRVNKKPVYDLRVKSTGLREGCEYEYRVYAENAAGLSLPSETSPLIRAEDPVFLPSPPSKPKIVDSGKTTITIAWVKPLFDGGAPITGYTVEYKKSDDTDWKTSIQSLRGTEYTISGLTTGAEYVFRVKSVNKVGASDPSDSSDPQIAKEREEEPLFDIDSEMRKTLIVKAGASFTMTVPFRGRPVPNVLWSKPDTDLRTRAYVDTTDSRTSLTIENANRNDSGKYTLTIQNVLSAASLTLVVKVLDTPGPPTNITVQDVTKESAVLSWDVPENDGGAPVKNYHIEKREASKKAWVSVTNNCNRLSYKVTNLQEGAIYYFRVSGENEFGVGIPAETKEGVKITEKPSPPEKLGVTSISKDSVSLTWLKPEHDGGSRIVHYVVEALEKGQKNWVKCAVAKSTHHVVSGLRENSEYFFRVFAENQAGLSDPRELLLPVLIKEQLEPPEIDMKNFPSHTVYVRAGSNLKVDIPISGKPLPKVTLSRDGVPLKATMRFNTEITAENLTINLKESVTADAGRYEITAANSSGTTKAFINIVVLDRPGPPTGPVVISDITEESVTLKWEPPKYDGGSQVTNYILLKRETSTAVWTEVSATVARTMMKVMKLTTGEEYQFRIKAENRFGISDHIDSACVTVKLPYTTPGPPSTPWVTNVTRESITVGWHEPVSNGGSAVVGYHLEMKDRNSILWQKANKLVIRTTHFKVTTISAGLIYEFRVYAENAAGVGKPSHPSEPVLAIDACEPPRNVRITDISKNSVSLSWQQPAFDGGSKITGYIVERRDLPDGRWTKASFTNVTETQFIISGLTQNSQYEFRVFARNAVGSISNPSEVVGPITCIDSYGGPVIDLPLEYTEVVKYRAGTSVKLRAGISGKPAPTIEWYKDDKELQTNALVCVENTTDLASILIKDADRLNSGCYELKLRNAMGSASATIRVQILDKPGPPGGPIEFKTVTAEKITLLWRPPADDGGAKITHYIVEKRETSRVVWSMVSEHLEECIITTTKIIKGNEYIFRVRAVNKYGIGEPLESDSVVAKNAFVTPGPPGIPEVTKITKNSMTVVWSRPIADGGSDISGYFLEKRDKKSLGWFKVLKETIRDTRQKVTGLTENSDYQYRVCAVNAAGQGPFSEPSEFYKAADPIDPPGPPAKIRIADSTKSSITLGWSKPVYDGGSAVTGYVVEIRQGEEEEWTTVSTKGEVRTTEYVVSNLKPGVNYYFRVSAVNCAGQGEPIEMNEPVQAKDILEAPEIDLDVALRTSVIAKAGEDVQVLIPFKGRPPPTVTWRKDEKNLGSDARYSIENTDSSSLLTIPQVTRNDTGKYILTIENGVGEPKSSTVSVKVLDTPAACQKLQVKHVSRGTVTLLWDPPLIDGGSPIINYVIEKRDATKRTWSVVSHKCSSTSFKLIDLSEKTPFFFRVLAENEIGIGEPCETTEPVKAAEVPAPIRDLSMKDSTKTSVILSWTKPDFDGGSVITEYVVERKGKGEQTWSHAGISKTCEIEVSQLKEQSVLEFRVFAKNEKGLSDPVTIGPITVKELIITPEVDLSDIPGAQVTVRIGHNVHLELPYKGKPKPSISWLKDGLPLKESEFVRFSKTENKITLSIKNAKKEHGGKYTVILDNAVCRIAVPITVITLGPPSKPKGPIRFDEIKADSVILSWDVPEDNGGGEITCYSIEKRETSQTNWKMVCSSVARTTFKVPNLVKDAEYQFRVRAENRYGVSQPLVSSIIVAKHQFRIPGPPGKPVIYNVTSDGMSLTWDAPVYDGGSEVTGFHVEKKERNSILWQKVNTSPISGREYRATGLVEGLDYQFRVYAENSAGLSSPSDPSKFTLAVSPVDPPGTPDYIDVTRETITLKWNPPLRDGGSKIVGYSIEKRQGNERWVRCNFTDVSECQYTVTGLSPGDRYEFRIIARNAVGTISPPSQSSGIIMTRDENVPPIVEFGPEYFDGLIIKSGESLRIKALVQGRPVPRVTWFKDGVEIEKRMNMEITDVLGSTSLFVRDATRDHRGVYTVEAKNASGSAKAEIKVKVQDTPGKVVGPIRFTNITGEKMTLWWDAPLNDGCAPITHYIIEKRETSRLAWALIEDKCEAQSYTAIKLINGNEYQFRVSAVNKFGVGRPLDSDPVVAQIQYTVPDAPGIPEPSNITGNSITLTWARPESDGGSEIQQYILERREKKSTRWVKVISKRPISETRFKVTGLTEGNEYEFHVMAENAAGVGPASGISRLIKCREPVNPPGPPTVVKVTDTSKTTVSLEWSKPVFDGGMEIIGYIIEMCKADLGDWHKVNAEACVKTRYTVTDLQAGEEYKFRVSAINGAGKGDSCEVTGTIKAVDRLTAPELDIDANFKQTHVVRAGASIRLFIAYQGRPTPTAVWSKPDSNLSLRADIHTTDSFSTLTVENCNRNDAGKYTLTVENNSGSKSITFTVKVLDTPGPPGPITFKDVTRGSATLMWDAPLLDGGARIHHYVVEKREASRRSWQVISEKCTRQIFKVNDLAEGVPYYFRVSAVNEYGVGEPYEMPEPIVATEQPAPPRRLDVVDTSKSSAVLAWLKPDHDGGSRITGYLLEMRQKGSDFWVEAGHTKQLTFTVERLVEKTEYEFRVKAKNDAGYSEPREAFSSVIIKEPQIEPTADLTGITNQLITCKAGSPFTIDVPISGRPAPKVTWKLEEMRLKETDRVSITTTKDRTTLTVKDSMRGDSGRYFLTLENTAGVKTFSVTVVVIGRPGPVTGPIEVSSVSAESCVLSWGEPKDGGGTEITNYIVEKRESGTTAWQLVNSSVKRTQIKVTHLTKYMEYSFRVSSENRFGVSKPLESAPIIAEHPFVPPSAPTRPEVYHVSANAMSIRWEEPYHDGGSKIIGYWVEKKERNTILWVKENKVPCLECNYKVTGLVEGLEYQFRTYALNAAGVSKASEASRPIMAQNPVDAPGRPEVTDVTRSTVSLIWSAPAYDGGSKVVGYIIERKPVSEVGDGRWLKCNYTIVSDNFFTVTALSEGDTYEFRVLAKNAAGVISKGSESTGPVTCRDEYAPPKAELDARLHGDLVTIRAGSDLVLDAAVGGKPEPKIIWTKGDKELDLCEKVSLQYTGKRATAVIKFCDRSDSGKYTLTVKNASGTKAVSVMVKVLDSPGPCGKLTVSRVTQEKCTLAWSLPQEDGGAEITHYIVERRETSRLNWVIVEGECPTLSYVVTRLIKNNEYIFRVRAVNKYGPGVPVESEPIVARNSFTIPSPPGIPEEVGTGKEHIIIQWTKPESDGGNEISNYLVDKREKKSLRWTRVNKDYVVYDTRLKVTSLMEGCDYQFRVTAVNAAGNSEPSEASNFISCREPSYTPGPPSAPRVVDTTKHSISLAWTKPMYDGGTDIVGYVLEMQEKDTDQWYRVHTNATIRNTEFTVPDLKMGQKYSFRVAAVNVKGMSEYSESIAEIEPVERIEIPDLELADDLKKTVTIRAGASLRLMVSVSGRPPPVITWSKQGIDLASRAIIDTTESYSLLIVDKVNRYDAGKYTIEAENQSGKKSATVLVKVYDTPGPCPSVKVKEVSRDSVTITWEIPTIDGGAPVNNYIVEKREAAMRAFKTVTTKCSKTLYRISGLVEGTMYYFRVLPENIYGIGEPCETSDAVLVSEVPLVPAKLEVVDVTKSTVTLAWEKPLYDGGSRLTGYVLEACKAGTERWMKVVTLKPTVLEHTVTSLNEGEQYLFRIRAQNEKGVSEPRETVTAVTVQDLRVLPTIDLSTMPQKTIHVPAGRPVELVIPIAGRPPPAASWFFAGSKLRESERVTVETHTKVAKLTIRETTIRDTGEYTLELKNVTGTTSETIKVIILDKPGPPTGPIKIDEIDATSITISWEPPELDGGAPLSGYVVEQRDAHRPGWLPVSESVTRSTFKFTRLTEGNEYVFRVAATNRFGIGSYLQSEVIECRSSIRIPGPPETLQIFDVSRDGMTLTWYPPEDDGGSQVTGYIVERKEVRADRWVRVNKVPVTMTRYRSTGLTEGLEYEHRVTAINARGSGKPSRPSKPIVAMDPIAPPGKPQNPRVTDTTRTSVSLAWSVPEDEGGSKVTGYLIEMQKVDQHEWTKCNTTPTKIREYTLTHLPQGAEYRFRVLACNAGGPGEPAEVPGTVKVTEMLEYPDYELDERYQEGIFVRQGGVIRLTIPIKGKPFPICKWTKEGQDISKRAMIATSETHTELVIKEADRGDSGTYDLVLENKCGKKAVYIKVRVIGSPNSPEGPLEYDDIQVRSVRVSWRPPADDGGADILGYILERREVPKAAWYTIDSRVRGTSLVVKGLKENVEYHFRVSAENQFGISKPLKSEEPVTPKTPLNPPEPPSNPPEVLDVTKSSVSLSWSRPKDDGGSRVTGYYIERKETSTDKWVRHNKTQITTTMYTVTGLVPDAEYQFRIIAQNDVGLSETSPASEPVVCKDPFDKPSQPGELEILSISKDSVTLQWEKPECDGGKEILGYWVEYRQSGDSAWKKSNKERIKDKQFTIGGLLEATEYEFRVFAENETGLSRPRRTAMSIKTKLTSGEAPGIRKEMKDVTTKLGEAAQLSCQIVGRPLPDIKWYRFGKELIQSRKYKMSSDGRTHTLTVMTEEQEDEGVYTCIATNEVGEVETSSKLLLQATPQFHPGYPLKEKYYGAVGSTLRLHVMYIGRPVPAMTWFHGQKLLQNSENITIENTEHYTHLVMKNVQRKTHAGKYKVQLSNVFGTVDAILDVEIQDKPDKPTGPIVIEALLKNSAVISWKPPADDGGSWITNYVVEKCEAKEGAEWQLVSSAISVTTCRIVNLTENAGYYFRVSAQNTFGISDPLEVSSVVIIKSPFEKPGAPGKPTITAVTKDSCVVAWKPPASDGGAKIRNYYLEKREKKQNKWISVTTEEIRETVFSVKNLIEGLEYEFRVKCENLGGESEWSEISEPITPKSDVPIQAPHFKEELRNLNVRYQSNATLVCKVTGHPKPIVKWYRQGKEIIADGLKYRIQEFKGGYHQLIIASVTDDDATVYQVRATNQGGSVSGTASLEVEVPAKIHLPKTLEGMGAVHALRGEVVSIKIPFSGKPDPVITWQKGQDLIDNNGHYQVIVTRSFTSLVFPNGVERKDAGFYVVCAKNRFGIDQKTVELDVADVPDPPRGVKVSDVSRDSVNLTWTEPASDGGSKITNYIVEKCATTAERWLRVGQARETRYTVINLFGKTSYQFRVIAENKFGLSKPSEPSEPTITKEDKTRAMNYDEEVDETREVSMTKASHSSTKELYEKYMIAEDLGRGEFGIVHRCVETSSKKTYMAKFVKVKGTDQVLVKKEISILNIARHRNILHLHESFESMEELVMIFEFISGLDIFERINTSAFELNEREIVSYVHQVCEALQFLHSHNIGHFDIRPENIIYQTRRSSTIKIIEFGQARQLKPGDNFRLLFTAPEYYAPEVHQHDVVSTATDMWSLGTLVYVLLSGINPFLAETNQQIIENIMNAEYTFDEEAFKEISIEAMDFVDRLLVKERKSRMTASEALQHPWLKQKIERVSTKVIRTLKHRRYYHTLIKKDLNMVVSAARISCGGAIRSQKGVSVAKVKVASIEIGPVSGQIMHAVGEEGGHVKYVCKIENYDQSTQVTWYFGVRQLENSEKYEITYEDGVAILYVKDITKLDDGTYRCKVVNDYGEDSSYAELFVKGVREVYDYYCRRTMKKIKRRTDTMRLLERPPEFTLPLYNKTAYVGENVRFGVTITVHPEPHVTWYKSGQKIKPGDNDKKYTFESDKGLYQLTINSVTTDDDAEYTVVARNKYGEDSCKAKLTVTLHPPPTDSTLRPMFKRLLANAECQEGQSVCFEIRVSGIPPPTLKWEKDGQPLSLGPNIEIIHEGLDYYALHIRDTLPEDTGYYRVTATNTAGSTSCQAHLQVERLRYKKQEFKSKEEHERHVQKQIDKTLRMAEILSGTESVPLTQVAKEALREAAVLYKPAVSTKTVKGEFRLEIEEKKEERKLRMPYDVPEPRKYKQTTIEEDQRIKQFVPMSDMKWYKKIRDQYEMPGKLDRVVQKRPKRIRLSRWEQFYVMPLPRITDQYRPKWRIPKLSQDDLEIVRPARRRTPSPDYDFYYRPRRRSLGDISDEELLLPIDDYLAMKRTEEERLRLEEELELGFSASPPSRSPPHFELSSLRYSSPQAHVKVEETRKDFRYSTYHIPTKAEASTSYAELRERHAQAAYRQPKQRQRIMAEREDEELLRPVTTTQHLSEYKSELDFMSKEEKSRKKSRRQREVTEITEIEEEYEISKHAQRESSSSASRLLRRRRSLSPTYIELMRPVSELIRSRPQPAEEYEDDTERRSPTPERTRPRSPSPVSSERSLSRFERSARFDIFSRYESMKAALKTQKTSERKYEVLSQQPFTLDHAPRITLRMRSHRVPCGQNTRFILNVQSKPTAEVKWYHNGVELQESSKIHYTNTSGVLTLEILDCHTDDSGTYRAVCTNYKGEASDYATLDVTGGDYTTYASQRRDEEVPRSVFPELTRTEAYAVSSFKKTSEMEASSSVREVKSQMTETRESLSSYEHSASAEMKSAALEEKSLEEKSTTRKIKTTLAARILTKPRSMTVYEGESARFSCDTDGEPVPTVTWLRKGQVLSTSARHQVTTTKYKSTFEISSVQASDEGNYSVVVENSEGKQEAEFTLTIQKARVTEKAVTSPPRVKSPEPRVKSPEAVKSPKRVKSPEPSHPKAVSPTETKPTPTEKVQHLPVSAPPKITQFLKAEASKEIAKLTCVVESSVLRAKEVTWYKDGKKLKENGHFQFHYSADGTYELKINNLTESDQGEYVCEISGEGGTSKTNLQFMGQAFKSIHEKVSKISETKKSDQKTTESTVTRKTEPKAPEPISSKPVIVTGLQDTTVSSDSVAKFAVKATGEPRPTAIWTKDGKAITQGGKYKLSEDKGGFFLEIHKTDTSDSGLYTCTVKNSAGSVSSSCKLTIKAIKDTEAQKVSTQKTSEITPQKKAVVQEEISQKALRSEEIKMSEAKSQEKLALKEEASKVLISEEVKKSAATSLEKSIVHEEITKTSQASEEVRTHAEIKAFSTQMSINEGQRLVLKANIAGATDVKWVLNGVELTNSEEYRYGVSGSDQTLTIKQASHRDEGILTCISKTKEGIVKCQYDLTLSKELSDAPAFISQPRSQNINEGQNVLFTCEISGEPSPEIEWFKNNLPISISSNVSISRSRNVYSLEIRNASVSDSGKYTIKAKNFRGQCSATASLMVLPLVEEPSREVVLRTSGDTSLQGSFSSQSVQMSASKQEASFSSFSSSSASSMTEMKFASMSAQSMSSMQESFVEMSSSSFMGISNMTQLESSTSKMLKAGIRGIPPKIEALPSDISIDEGKVLTVACAFTGEPTPEVTWSCGGRKIHSQEQGRFHIENTDDLTTLIIMDVQKQDGGLYTLSLGNEFGSDSATVNIHIRSI

SEQ ID NO: 37 - protein, 1438 aa, Artificial Sequence
  Synthetic
MSMLKPSGLKAPTKILKPGSTALKTPTAVVAPVEKTISSEKASSTPSSETQEEFVDDFRVGERVWVNGNKPGFIQFLGETQFAPGQWAGIVLDEPIGKNDGSVAGVRYFQCEPLKGIFTRPSKLTRKVQAEDEANGLQTTPASRATSPLCTSTASMVSSSPSTPSNIPQKPSQPAAKEPSATPPISNLTKTASESISNLSEAGSIKKGERELKIGDRVLVGGTKAGVVRFLGETDFAKGEWCGVELDEPLGKNDGAVAGTRYFQCQPKYGLFAPVHKVTKIGFPSTTPAKAKANAVRRVMATTSASLKRSPSASSLSSMSSVASSVSSRPSRTGLLTETSSRYARKISGTTALQEALKEKQQHIEQLLAERDLERAEVAKATSHVGEIEQELALARDGHDQHVLELEAKMDQLRTMVEAADREKVELLNQLEEEKRKVEDLQFRVEEESITKGDLEQKSQISEDPENTQTKLEHARIKELEQSLLFEKTKADKLQRELEDTRVATVSEKSRIMELEKDLALRVQEVAELRRRLESNKPAGDVDMSLSLLQEISSLQEKLEVTRTDHQREITSLKEHFGAREETHQKEIKALYTATEKLSKENESLKSKLEHANKENSDVIALWKSKLETAIASHQQAMEELKVSFSKGLGTETAEFAELKTQIEKMRLDYQHEIENLQNQQDSERAAHAKEMEALRAKLMKVIKEKENSLEAIRSKLDKAEDQHLVEMEDTLNKLQEAEIKVKELEVLQAKCNEQTKVIDNFTSQLKATEEKLLDLDALRKASSEGKSEMKKLRQQLEAAEKQIKHLEIEKNAESSKASSITRELQGRELKLTNLQENLSEVSQVKETLEKELQILKEKFAEASEEAVSVQRSMQETVNKLHQKEEQFNMLSSDLEKLRENLADMEAKFREKDEREEQLIKAKEKLENDIAEIMKMSGDNSSQLTKMNDELRLKERDVEELQLKLTKANENASFLQKSIEDMTVKAEQSQQEAAKKHEEEKKELERKLSDLEKKMETSHNQCQELKARYERATSETKTKHEEILQNLQKTLLDTEDKLKGAREENSGLLQELEELRKQADKAKAAQTAEDAMQIMEQMTKEKTETLASLEDTKQTNAKLQNELDTLKENNLKNVEELNKSKELLTVENQKMEEFRKEIETLKQAAAQKSQQLSALQEENVKLAEELGRSRDEVTSHQKLEEERSVLNNQLLEMKKRESKFIKDADEEKASLQKSISITSALLTEKDAELEKLRNEVTVLRGENASAKSLHSVVQTLESDKVKLELKVKNLELQLKENKRQLSSSSGNTDTQADEDERAQESQIDFLNSVIVDLQRKNQDLKMKVEMMSEAALNGNGDDLNNYDSDDQEKQSKKKPRLFCDICDCFDLHDTEDCPTQAQMSEDPPHSTHHGSRGEERPYCEICEMFGHWATNCNDDETF

SEQ ID NO: 38 - protein, 1050 aa, Artificial Sequence
  Synthetic
MAAVKKEGGALSEAMSLEGDEWELSKENVQPLRQGRIMSTLQGALAQESACNNTLQQQKRAFEYEIRFYTGNDPLDVWDRYISWTEQNYPQGGKESNMSTLLERAVEALQGEKRYYSDPRFLNLWLKLGRLCNEPLDMYSYLHNQGIGVSLAQFYISWAEEYEARENFRKADAIFQEGIQQKAEPLERLQSQHRQFQARVSRQTLLALEKEEEEEVFESSVPQRSTLAELKSKGKKTARAPIIRVGGALKAPSQNRGLQNPFPQQMQNNSRITVFDENADEASTAELSKPTVQPWIAPPMPRAKENELQAGPWNTGRSLEHRPRGNTASLIAVPAVLPSFTPYVEETARQPVMTPCKIEPSINHILSTRKPGKEEGDPLQRVQSHQQASEEKKEKMMYCKEKIYAGVGEFSFEEIRAEVFRKKLKEQREAELLTSAEKRAEMQKQIEEMEKKLKEIQTTQQERTGDQQEETMPTKETTKLQIASESQKIPGMTLSSSVCQVNCCARETSLAENIWQEQPHSKGPSVPFSIFDEFLLSEKKNKSPPADPPRVLAQRRPLAVLKTSESITSNEDVSPDVCDEFTGIEPLSEDAIITGFRNVTICPNPEDTCDFARAARFVSTPFHEIMSLKDLPSDPERLLPEEDLDVKTSEDQQTACGTIYSQTLSIKKLSPIIEDSREATHSSGFSGSSASVASTSSIKCLQIPEKLELTNETSENPTQSPWCSQYRRQLLKSLPELSASAELCIEDRPMPKLEIEKEIELGNEDYCIKREYLICEDYKLFWVAPRNSAELTVIKVSSQPVPWDFYINLKLKERLNEDFDHFCSCYQYQDGCIVWHQYINCFTLQDLLQHSEYITHEITVLIIYNLLTIVEMLHKAEIVHGDLSPRCLILRNRIHDPYDCNKNNQALKIVDFSYSVDLRVQLDVFTLSGFRTVQILEGQKILANCSSPYQVDLFGIADLAHLLLFKEHLQVFWDGSFWKLSQNISELKDGELWNKFFVRILNANDEATVSVLGELAAEMNGVFDTTFQSHLNKALWKVGKLTSPGALLFQ

SEQ ID NO: 39 - protein, 912 aa, Artificial Sequence
  Synthetic
MEDFARGAASPGPSRPGLVPVSIIGAEDEDFENELETNSEEQNSQFQSLEQVKRRPAHLMALLQHVALQFEPGPLLCCLHADMLGSLGPKEAKKAFLDFYHSFLEKTAVLRVPVPPNVAFELDRTRADLISEDVQRRFVQEVVQSQQVAVGRQLEDFRSKRLMGMTPWEQELAQLEAWVGRDRASYEARERHVAERLLMHLEEMQHTISTDEEKSAAVVNAIGLYMRHLGVRTKSGDKKSGRNFFRKKVMGNRRSDEPAKTKKGLSSILDAARWNRGEPQVPDFRHLKAEVDAEKPGATDRKGGVGMPSRDRNIGAPGQDTPGVSLHPLSLDSPDREPGADAPLELGDSSPQGPMSLESLAPPESTDEGAETESPEPGDEGEPGRSGLELEPEEPPGWRELVPPDTLHSLPKSQVKRQEVISELLVTEAAHVRMLRVLHDLFFQPMAECLFFPLEELQNIFPSLDELIEVHSLFLDRLMKRRQESGYLIEEIGDVLLARFDGAEGSWFQKISSRFCSRQSFALEQLKAKQRKDPRFCAFVQEAESRPRCRRLQLKDMIPTEMQRLTKYPLLLQSIGQNTEEPTEREKVELAAECCREILHHVNQAVRDMEDLLRLKDYQRRLDLSHLRQSSDPMLSEFKNLDITKKKLVHEGPLTWRVTKDKAVEVHVLLLDDLLLLLQRQDERLLLKSHSRTLTPTPDGKTMLRPVLRLTSAMTREVATDHKAFYVLFTWDQEAQIYELVAQTVSERKNWCALITETAGSLKVPAPASRPKPRPSPSSTREPLLSSSENGNGGRETSPADARTERILSDLLPFCRPGPEGQLAATALRKVLSLKQLLFPAEEDNGAGPPRDGDGVPGGGPLSPARTQEIQENLLSLEETMKQLEELEEEFCRLRPLLSQLGGNSVPQPGCT

SEQ ID NO: 40 - protein, 34350 aa, Artificial Sequence; identical to SEQ ID NO: 36
  Synthetic

SEQ ID NO: 41 - protein, 3056 aa, Artificial Sequence
  Synthetic
MSLVLNDLLICCRQLEHDRATERKKEVEKFKRLIRDPETIKHLDRHSDSKQGKYLNWDAVFRFLQKYIQKETECLRIAKPNVSASTQASRQKKMQEISSLVKYFIKCANRRAPRLKCQELLNYIMDTVKDSSNGAIYGADCSNILLKDILSVRKYWCEISQQQWLELFSVYFRLYLKPSQDVHRVLVARIIHAVTKGCCSQTDGLNSKFLDFFSKAIQCARQEKSSSGLNHILAALTIFLKTLAVNFRIRVCELGDEILPTLLYIWTQHRLNDSLKEVIIELFQLQIYIHHPKGAKTQEKGAYESTKWRSILYNLYDLLVNEISHIGSRGKYSSGFRNIAVKENLIELMADICHQVFNEDTRSLEISQSYTTTQRESSDYSVPCKRKKIELGWEVIKDHLQKSQNDFDLVPWLQIATQLISKYPASLPNCELSPLLMILSQLLPQQRHGERTPYVLRCLTEVALCQDKRSNLESSQKSDLLKLWNKIWCITFRGISSEQIQAENFGLLGAIIQGSLVEVDREFWKLFTGSACRPSCPAVCCLTLALTTSIVPGTVKMGIEQNMCEVNRSFSLKESIMKWLLFYQLEGDLENSTEVPPILHSNFPHLVLEKILVSLTMKNCKAAMNFFQSVPECEHHQKDKEELSFSEVEELFLQTTFDKMDFLTIVRECGIEKHQSSIGFSVHQNLKESLDRCLLGLSEQLLNNYSSEITNSETLVRCSRLLVGVLGCYCYMGVIAEEEAYKSELFQKAKSLMQCAGESITLFKNKTNEEFRIGSLRNMMQLCTRCLSNCTKKSPNKIASGFFLRLLTSKLMNDIADICKSLASFIKKPFDRGEVESMEDDTNGNLMEVEDQSSMNLFNDYPDSSVSDANEPGESQSTIGAINPLAEEYLSKQDLLFLDMLKFLCLCVTTAQTNTVSFRAADIRRKLLMLIDSSTLEPTKSLHLHMYLMLLKELPGEEYPLPMEDVLELLKPLSNVCSLYRRDQDVCKTILNHVLHVVKNLGQSNMDSENTRDAQGQFLTVIGAFWHLTKERKYIFSVRMALVNCLKTLLEADPYSKWAILNVMGKDFPVNEVFTQFLADNHHQVRMLAAESINRLFQDTKGDSSRLLKALPLKLQQTAFENAYLKAQEGMREMSHSAENPETLDEIYNRKSVLLTLIAVVLSCSPICEKQALFALCKSVKENGLEPHLVKKVLEKVSETFGYRRLEDFMASHLDYLVLEWLNLQDTEYNLSSFPFILLNYTNIEDFYRSCYKVLIPHLVIRSHFDEVKSIANQIQEDWKSLLTDCFPKILVNILPYFAYEGTRDSGMAQQRETATKVYDMLKSENLLGKQIDHLFISNLPEIVVELLMTLHEPANSSASQSTDLCDFSGDLDPAPNPPHFPSHVIKATFAYISNCHKTKLKSILEILSKSPDSYQKILLAICEQAAETNNVYKKHRILKIYHLFVSLLLKDIKSGLGGAWAFVLRDVIYTLIHYINQRPSCIMDVSLRSFSLCCDLLSQVCQTAVTYCKDALENHLHVIVGTLIPLVYEQVEVQKQVLDLLKYLVIDNKDNENLYITIKLLDPFPDHVVFKDLRITQQKIKYSRGPFSLLEEINHFLSVSVYDALPLTRLEGLKDLRRQLELHKDQMVDIMRASQDNPQDGIMVKLVVNLLQLSKMAINHTGEKEVLEAVGSCLGEVGPIDFSTIAIQHSKDASYTKALKLFEDKELQWTFIMLTYLNNTLVEDCVKVRSAAVTCLKNILATKTGHSFWEIYKMTTDPMLAYLQPFRTSRKKFLEVPRFDKENPFEGLDDINLWIPLSENHDIWIKTLTCAFLDSGGTKCEILQLLKPMCEVKTDFCQTVLPYLIHDILLQDTNESWRNLLSTHVQGFFTSCLRHFSQTSRSTTPANLDSESEHFFRCCLDKKSQRTMLAVVDYMRRQKRPSSGTIFNDAFWLDLNYLEVAKVAQSCAAHFTALLYAEIYADKKSMDDQEKRSLAFEEGSQNTTISSLSEKSKEETGISLQDLLLEIYRSIGEPDSLYGCGGGKMLQPITRLRTYEHEAMWGKALVTYDLETAIPSSTRQAGIIQALQNLGLCHILSVYLKGLDYENKDWCPELEELHYQAAWRNMQWDHCTSVSKEVEGTSYHESLYNALQSLRDREFSTFYESLKYARVKEVEEMCKRSLESVYSLYPTLSRLQAIGELESIGELFSRSVTHRQLSEVYIKWQKHSQLLKDSDFSFQEPIMALRTVILEILMEKEMDNSQRECIKDILTKHLVELSILARTFKNTQLPERAIFQIKQYNSVSCGVSEWQLEEAQVFWAKKEQSLALSILKQMIKKLDASCAANNPSLKLTYTECLRVCGNWLAETCLENPAVIMQTYLEKAVEVAGNYDGESSDELRNGKMKAFLSLARFSDTQYQRIENYMKSSEFENKQALLKRAKEEVGLLREHKIQTNRYTVKVQRELELDELALRALKEDRKRFLCKAVENYINCLLSGEEHDMWVFRLCSLWLENSGVSEVNGMMKRDGMKIPTYKFLPLMYQLAARMGTKMMGGLGFHEVLNNLISRISMDHPHHTLFIILALANANRDEFLTKPEVARRSRITKNVPKQSSQLDEDRTEAANRIICTIRSRRPQMVRSVEALCDAYIILANLDATQWKTQRKGINIPADQPITKLKNLEDVVVPTMEIKVDHTGEYGNLVTIQSFKAEFRLAGGVNLPKIIDCVGSDGKERRQLVKGRDDLRQDAVMQQVFQMCNTLLQRNTETRKRKLTICTYKVVPLSQRSGVLEWCTGTVPIGEFLVNNEDGAHKRYRPNDFSAFQCQKKMMEVQKKSFEEKYEVFMDVCQNFQPVFRYFCMEKFLDPAIWFEKRLAYTRSVATSSIVGYILGLGDRHVQNILINEQSAELVHIDLGVAFEQGKILPTPETVPFRLTRDIVDGMGITGVEGVFRRCCEKTMEVMRNSQETLLTIVEVLLYDPLFDWTMNPLKALYLQQRPEDETELHPTLNADDQECKRNLSDIDQSFNKVAERVLMRLQEKLKGVEEGTVLSVGGQVNLLIQQAIDPKNLSRLFPGWKAWV

SEQ ID NO: 42 - protein, 745 aa, Artificial Sequence
  Synthetic
MGVPFFSSLRCMVDLGPCWAGGLTAEMKLLLALAGLLAILATPQPSEGAAPAVLGEVDTSLVLSSMEEAKQLVDKAYKERRESIKQRLRSGSASPMELLSYFKQPVAATRTAVRAADYLHVALDLLERKLRSLWRRPFNVTDVLTPAQLNVLSKSSGCAYQDVGVTCPEQDKYRTITGMCNNRRSPTLGASNRAFVRWLPAEYEDGFSLPYGWTPGVKRNGFPVALARAVSNEIVRFPTDQLTPDQERSLMFMQWGQLLDHDLDFTPEPAARASFVTGVNCETSCVQQPPCFPLKIPPNDPRIKNQADCIPFFRSCPACPGSNITIRNQINALTSFVDASMVYGSEEPLARNLRNMSNQLGLLAVNQRFQDNGRALLPFDNLHDDPCLLTNRSARIPCFLAGDTRSSEMPELTSMHTLLLREHNRLATELKSLNPRWDGERLYQEARKIVGAMVQIITYRDYLPLVLGPTAMRKYLPTYRSYNDSVDPRIANVFTNAFRYGHTLIQPFMFRLDNRYQPMEPNPRVPLSRVFFASWRVVLEGGIDPILRGLMATPAKLNRQNQIAVDEIRERLFEQVMRIGLDLPALNMQRSRDHGLPGYNAWRRFCGLPQPETVGQLGTVLRNLKLARKLMEQYGTPNNIDIWMGGVSEPLKRKGRVGPLLACIIGTQFRKLRDGDRFWWENEGVFSMQQRQALAQISLPRIICDNTGITTVSKNNIFMSNSYPRDFVNCSTLPALNLASWREAS

SEQ ID NO: 43 - protein, 1333 aa, Artificial Sequence
  Synthetic
MTADKLVFFVNGRKVVEKNADPETTLLAYLRRKLGLSGTKLGCGEGGCGACTVMLSKYDRLQNKIVHFSANACLAPICSLHHVAVTTVEGIGSTKTRLHPVQERIAKSHGSQCGFCTPGIVMSMYTLLRNQPEPTMEEIENAFQGNLCRCTGYRPILQGFRTFARDGGCCGGDGNNPNCCMNQKKDHSVSLSPSLFKPEEFTPLDPTQEPIFPPELLRLKDTPRKQLRFEGERVTWIQASTLKELLDLKAQHPDAKLVVGNTEIGIEMKFKNMLFPMIVCPAWIPELNSVEHGPDGISFGAACPLSIVEKTLVDAVAKLPAQKTEVFRGVLEQLRWFAGKQVKSVASVGGNIITASPISDLNPVFMASGAKLTLVSRGTRRTVQMDHTFFPGYRKTLLSPEEILLSIEIPYSREGEYFSAFKQASRREDDIAKVTSGMRVLFKPGTTEVQELALCYGGMANRTISALKTTQRQLSKLWKEELLQDVCAGLAEELHLPPDAPGGMVDFRCTLTLSFFFKFYLTVLQKLGQENLEDKCGKLDPTFASATLLFQKDPPADVQLFQEVPKGQSEEDMVGRPLPHLAADMQASGEAVYCDDIPRYENELSLRLVTSTRAHAKIKSIDTSEAKKVPGFVCFISADDVPGSNITGICNDETVFAKDKVTCVGHIIGAVVADTPEHTQRAAQGVKITYEELPAIITIEDAIKNNSFYGPELKIEKGDLKKGFSEADNVVSGEIYIGGQEHFYLETHCTIAVPKGEAGEMELFVSTQNTMKTQSFVAKMLGVPANRIVVRVKRMGGGFGGKETRSTVVSTAVALAAYKTGRPVRCMLDRDEDMLITGGRHPFLARYKVGFMKTGTVVALEVDHFSNVGNTQDLSQSIMERALFHMDNCYKIPNIRGTGRLCKTNLPSNTAFRGFGGPQGMLIAECWMSEVAVTCGMPAEEVRRKNLYKEGDLTHFNQKLEGFTLPRCWEECLASSQYHARKSEVDKFNKENCWKKRGLCIIPTKFGISFTVPFLNQAGALLHVYTDGSVLLTHGGTEMGQGLHTKMVQVASRALKIPTSKIYISETSTNTVPNTSPTAASVSADLNGQAVYAACQTILKRLEPYKKKNPSGSWEDWVTAAYMDTVSLSATGFYRTPNLGYSFETNSGNPFHYFSYGVACSEVEIDCLTGDHKNLRTDIVMDVGSSLNPAIDIGQVEGAFVQGLGLFTLEELHYSPEGSLHTRGPSTYKIPAFGSIPIEFRVSLLRDCPNKKAIYASKAVGEPPLFLAASIFFAIKDAIRAARAQHTGNNVKELFRLDSPATPEKIRNACVDKFTTLCVTGVPENCKPWSVRV

SEQ ID NO: 44 - protein, 4128 aa, Artificial Sequence [sequence omitted]

SEQ ID NO: 45 - protein, 2472 aa, Artificial Sequence; identical to SEQ ID NO: 25
  Synthetic

SEQ ID NO: 46 - protein, 407 aa, Artificial Sequence
  Synthetic
MSGGSADYNREHGGPEGMDPDGVIESNWNEIVDNFDDMNLKESLLRGIYAYGFEKPSAIQQRAIIPCIKGYDVIAQAQSGTGKTATFAISILQQLEIEFKETQALVLAPTRELAQQIQKVILALGDYMGATCHACIGGTNVRNEMQKLQAEAPHIVVGTPGRVFDMLNRRYLSPKWIKMFVLDEADEMLSRGFKDQIYEIFQKLNTSIQVVLLSATMPTDVLEVTKKFMRDPIRILVKKEELTLEGIKQFYINVEREEWKLDTLCDLYETLTITQAVIFLNTRRKVDWLTEKMHARDFTVSALHGDMDQKERDVIMREFRSGSSRVLITTDLLARGIDVQQVSLVINYDLPTNRENYIHRIGRGGRFGRKGVAINFVTEEDKRILRDIETFYNTTVEEMPMNVADLI

SEQ ID NO: 47 - protein, 15 aa, Artificial Sequence
  Synthetic
KMFVLDEADEMLSRG

SEQ ID NO: 48 - protein, 15 aa, Artificial Sequence
  Synthetic
KMFLLDEADEMLSRG

SEQ ID NO: 49 - protein, 9 aa, Artificial Sequence
  Synthetic
FVLDEADEM

SEQ ID NO: 50 - protein, 9 aa, Artificial Sequence
  Synthetic
FLLDEADEM

SEQ ID NO: 51 - protein, 10 aa, Artificial Sequence
  Synthetic
FVLDEADEML

SEQ ID NO: 52 - protein, 10 aa, Artificial Sequence
  Synthetic
FLLDEADEML

SEQ ID NO: 53 - protein, 9 aa, Artificial Sequence
  Synthetic
VLDEADEML

SEQ ID NO: 54 - protein, 9 aa, Artificial Sequence
  Synthetic
LLDEADEML

SEQ ID NO: 55 - protein, 9 aa, Artificial Sequence
  Synthetic
KMFVLDEAD

SEQ ID NO: 56 - protein, 9 aa, Artificial Sequence
  Synthetic
KMFLLDEAD

What is claimed is:

1) A method for identifying tumor-specific polypeptides, comprising:
obtaining a tumor polypeptide set from a tumor sample;
identifying polypeptides present in the tumor sample by comparing the tumor polypeptide set with a reference polypeptide set;
obtaining known mutant polypeptides for each identified tumor polypeptide from a mutant polypeptide set; and
identifying tumor-specific polypeptides by combining the tumor polypeptide set and the known mutant polypeptides and removing wild-type polypeptides.

2) The method of claim 1, further comprising:
obtaining mass spectra for one or more of the polypeptides; and
identifying the one or more polypeptides by the mass spectra.

3) The method of claim 1, farther comprising:
obtaining a sample mass spectra library of polypeptides from a tumor sample; and
generating the tumor polypeptide set by converting the mass spectra library to a set of tumor polypeptide sequences.

4) The method of claim 1, further comprising:
obtaining a gene mutation set from the tumor sample; and
generating the tumor polypeptide set by translating the DNA in the gene mutation set to amino acid sequences.

5) The method of claim 1 further comprising:
identifying tumor-specific polypeptides by identifying the polypeptides that are present in both the tumor polypeptide set and the blown mutant polypeptides.

6) The method of claim 3 further comprising:
obtaining a tumor-specific mass spectra library from the tumor-specific polypeptides; and
comparing the sample mass spectra library and the tumor-specific mass spectra library; and
identifying additional tumor-specific polypeptides by identifying polypeptides present in the sample mass spectra library and the tumor-specific mass spectra library.

7) The method of claim 4, further comprising:
obtaining the DNA sequences of the tumor-specific polypeptides from a reference database; and
identifying DNA sequences present in both the gene mutation set and the DNA sequences of the tumor-specific polypeptides; and
identifying additional tumor-specific polypeptides by translating the shared sequences to amino acid sequences.

8) A method for selecting a treatment strategy in a patient, comprising:
generating a patient tumor polypeptide signature comprising identifying polypeptides specific for a patient's tumor sample according to claim 1;
obtaining a control tumor polypeptide signature from one or more other patients who have been favorably treated;
comparing the patient tumor polypeptide signature with the control tumor polypeptide signatures;
determining the similarity of the signatures;
selecting a treatment strategy that produced a favorable outcome in the other patient if the signatures are similar.

9) A polypeptide comprising or consisting of one or more of the amino acid sequences according to SEQ. ID. Nos. 1-23.

10) A binding molecule, which selectively binds to at least one of the polypeptides identified as SEQ. ID. Nos. 1-23.

11) A method for increasing a patient's immune response to tumor cells, the method comprising administering one or more of the polypeptides identified as SEQ. ID. No. 1-23 to a patient.

12) The method of claim 31, wherein the polypeptides are administered prior to traditional cancer immunotherapy to enhance efficacy of the immunotherapy.

13) A composition for targeting therapeutic agents to a tumor, comprising the binding molecule of claim 10 and a therapeutic agent, wherein the binding molecule is conjugated to the therapeutic agent.

14) A method for targeting therapeutic agents to a tumor, comprising administering the composition of claim 13 to a patient with a tumor.

15) A composition for detecting tumors, the method comprising the binding molecule of claim 10 and a detectable label, wherein the binding molecule is conjugated to the detectable label.

16) A method of targeting a detectable label to a tumor, comprising administering the composition of claim 15 to a patient.

17) An array comprising a polypeptide set, the set consisting of one or more tumor-specific polypeptides identified by the method according to claim 1.

18) A method of generating antigen-HLA receptor complexes, comprising:
identifying tumor-specific polypeptides according to claim 1;
selecting tumor-specific polypeptides that bind to one or more HLA receptors;
obtaining recombinant tumor-specific polypeptides; and
conjugating the recombinant tumor-specific polypeptides with one or more HLA receptors.

19) A method of treating cancer comprising:
obtaining a sample from a cancer patient;
sorting cells in the patient sample with one or more of the antigen-HLA receptor complexes generated according to the method of claim 18;
identifying cancer-specific T-cells in the sample;
growing the cancer-specific T-cells in cell culture; and
administering the cancer-specific T cells to the cancer patient.

20) A method for generating a DNA vaccine comprising:
identifying tumor-specific polypeptides according to claim 1;
identifying the antigenic regions of the tumor-specific polypeptides;
obtaining nucleotide sequences that encode for a peptide that targets the antigenic regions of the tumor-specific polypeptides; and
preparing the DNA sequences as a vector.
